(19) United States
(12) Patent Application Publication
(10) Pub. No.: US 2025/0388915 A1
(43) Pub. Date: Dec. 25, 2025

(54) METHODS AND COMPOSITIONS FOR INTRON MEDIATED- EXPRESSION OF REGULATORY ELEMENTS FOR TRAIT DEVELOPMENT

(71) Applicant: InEdita Bio, Inc., Dover, DE (US)

(72) Inventors: Viviane Cristina HEINZEN DE SILVA, Florianópolis, SC (BR); Paulo ARRUDA, Campinas, São Paulo (BR)

(21) Appl. No.: 18/844,880

(22) PCT Filed: Mar. 6, 2023
(86) PCT No.: PCT/US2023/063791

§ 371 Date: Sep. 6, 2024

Related U.S. Application Data
(60) Provisional application No. 63/317,425, filed on Mar. 7, 2022.
(60) Provisional application No. 63/377,701, filed on Sep. 29, 2022.

(51) Int. Cl. C12N 15/82; C12N 9/22; C12N 15/11

(52) U.S. Cl. CPC C12N 15/8213; C12N 9/226; C12N 15/11; C12N 15/8205; C12N 15/8218; C12N 2310/14; C12N 2310/20

(57) ABSTRACT

Disclosed are compositions and methods for a non-coding nucleic acid gene editing platform for the delivery of regulatory nucleic acid sequences and small peptides in a cell. In a particular aspect, provided herein is a non-coding nucleic acid gene editing platform to down regulate endogenous genes and genes from pests and pathogens causing diseases. In another aspect, the non-coding nucleic acid gene editing platform described herein is useful to deliver small regulatory peptides encoded from nucleic acid sequences embedded in a non-coding nucleic acid of a gene. More specifically, the non-coding nucleic acid gene editing platform provided herein allows using non-coding nucleic acid from any gene to deliver regulatory nucleic acids and small peptides in a cell. In another aspect, such regulatory nucleic acids and small peptides are useful to develop traits to enhance crop quality and yield.

### CROSS-REFERENCE TO RELATED APPLICATION

[0001] This application is a U.S. National Application of International Application No. PCT/US2023/063791, filed Mar. 6, 2023, which claims priority to U.S. provisional application, 63/317,425 filed Mar. 7, 2022, and U.S. provisional application, 63/377,701 filed Sep. 29, 2022, the entirety of which is incorporated by reference herein.

### SEQUENCE LISTING

[0002] The instant application contains a Sequence Listing which has been submitted electronically in XML format and is hereby incorporated by reference in its entirety. Said XML copy, created on Apr. 22, 2025, is named 65864-701_831_SL.xml and is 3,412,529 bytes in size.

### BACKGROUND

[0003] Plants with high crop quality and yield are desired by both farmers and consumers. As the global population continues to grow, food must be produced in a sustainable and increased manner in order to satisfy the demand of the growing population. Therefore, there is a need for the development of genetically edited plants with improved biotechnological traits, such as enhanced crop quality, yield, pest resistance, disease resistance, chemical resistance, photosynthetic efficiency, and the like.

### SUMMARY

[0004] In various aspects, provided herein are plants harboring such improved biotechnological traits. For instance, plants having cells with modified non-coding regions such as introns comprising an endogenous or exogenous nucleic acid that, when expressed, confers one or more desired traits to the plant. In certain instances, the nucleic acid is exogenous to the non-coding region, such as an intron. In certain instances, the modified non-coding regions are genetically edited. As a non-limiting example, the non-coding region is or has been genetically edited using a CRISPR-Cas based method. As such, modified non-coding regions include non-coding regions that are or have been genetically edited.

[0005] In one aspect, provided herein is a system comprising a first nucleic acid sequence comprising a nucleic acid encoding a ribonucleic acid or a peptide, a second nucleic acid sequence comprising a sequence encoding a DNA nuclease, and a third nucleic acid sequence comprising a sequence encoding a guide RNA, wherein the guide RNA is complementary to a non-coding region of the genome of a cell. In some embodiments, the nucleic acid encodes the ribonucleic acid, and the ribonucleic acid specifically binds to (i) a target nucleic acid of Table 6, (ii) a target nucleic acid present in a pest of Table 6, (iii) a target nucleic acid of an organism of Table 6, (iv) a target nucleic acid exogenous or endogenous to the cell, (v) a target nucleic acid responsible for water acquisition, nutrient acquisition, disease control, or pest control, or any combination of two or more thereof, in the cell, (v) a target nucleic acid comprises a regulatory element involved in: plant growth and development, yield, biotic stress, abiotic stress, or herbicide resistance, or any combination of two or more thereof, (vi) a target nucleic acid of an insect, bacteria, fungi, or worm, or a combination of two or more thereof, that is harmful to the cell, (vii) a target nucleic acid of an organism that causes a disease to the cell, or (viii) a combination of two or more of (i) to (vii). In some embodiments, the nucleic acid encodes the ribonucleic acid, and the nucleic acid comprises a sequence at least 80%, 81%, 82%, 83%, 84%, 85%, 86%, 87%, 88%, 89%, 90%, 91%, 92%, 93%, 94%, 95%, 96%, 97%, 98%, or 99% identical to a sequence of any one of the target gene sequences of Table 6; and/or comprises a sequence at least 80%, 81%, 82%, 83%, 84%, 85%, 86%, 87%, 88%, 89%, 90%, 91%, 92%, 93%, 94%, 95%, 96%, 97%, 98%, or 99% identical to at least 10 contiguous bases of any one of the target gene sequences of Table 6. In some embodiments, the nucleic acid encodes the peptide, and the peptide is (i) a peptide selected from Table 7, (ii) a peptide encoded by an mRNA sequence at least 80%, 81%, 82%, 83%, 84%, 85%, 86%, 87%, 88%, 89%, 90%, 91%, 92%, 93%, 94%, 95%, 96%, 97%, 98%, or 99% identical to a sequence of Table 8, (iii) a peptide that affects hormonal regulation, protection against a pathogen, protection against an insect, nitrogen fixation, nutrient acquisition, immunity induction, biotic stress, or abiotic stress, or a combination of two or more thereof, in the cell, or (iv) a combination of two or more of (i) to (iii). In some embodiments, the nucleic acid encodes the peptide, and the nucleic acid comprises a sequence at least 80%, 81%, 82%, 83%, 84%, 85%, 86%, 87%, 88%, 89%, 90%, 91%, 92%, 93%, 94%, 95%, 96%, 97%, 98%, or 99% identical to a sequence of Table 8. In some embodiments, the non-coding region is positioned within, or adjacent to, a gene of the cell. In some embodiments, the gene is actin, ubiquitin, ribosomal gene, gene encoding a heat shock protein, rubisco, tubulin, TMM, FAMA, rbc-S, CAB2, Rac, GLP, PDX1, BiGSSP, Lhca3, SMB, GATA23, ARF, SIREO, Prx, TIP2, ET304, TobRB7, or a gene selected from Table 1. In some embodiments, the non-coding region is selected from Table 2. In some embodiments, the non-coding region comprises a site recognized by the DNA nuclease (nuclease recognition site). In some embodiments, the nuclease recognition site comprises a protospacer adjacent motif (PAM). In some embodiments, the nuclease recognition site is selected from Table 3. In some embodiments, the gRNA is complementary to about 17 to about 22 nucleotides of the non-coding region. In some embodiments, the gRNA comprises a sequence at least 80%, 81%, 82%, 83%, 84%, 85%, 86%, 87%, 88%, 89%, 90%, 91%, 92%, 93%, 94%, 95%, 96%, 97%, 98%, or 99% identical to a sequence of Table 4. In some embodiments, the system comprises a plasmid, wherein the second nucleic acid and the third nucleic acid are present in the plasmid. In some embodiments, (i) the first nucleic acid comprises a first nuclease cleavage site and a second nucleic cleavage site, and the nucleic acid encoding the ribonucleic acid or the peptide is positioned between the first nuclease cleavage site and the second nuclease cleavage site, optionally wherein the first nuclease cleavage site and the second nuclease cleavage site are recognized by the DNA nuclease; (ii) the first nucleic acid is a blunt linear double-stranded oligodeoxynucleotide (dsODN) encoding the ribonucleic acid or the peptide; (iii) the first nucleic acid is a chemically modified dsODN encoding the ribonucleic acid or a peptide, optionally comprising a phosphorothioate linkage and/or 5′ phosphorylation; or (iv) the first nucleic acid is a blunt single-stranded oligodeoxynucleotide (ssODN) encoding the ribonucleic acid or the peptide. In some embodiments, the DNA nuclease is a CRISPR-Cas nuclease.

[0006] In one aspect, provided herein is a method of inserting the nucleic acid encoding the ribonucleic acid or the peptide into the non-coding region of the cell, the method comprising introducing the system as described herein into the cell. In some embodiments, the cell comprises the nucleic acid encoding the ribonucleic acid or the peptide as described herein positioned within the non-coding region of the genome of the cell. In some embodiments, the non-coding region is adjacent to a gene encoding a mRNA, and after transcription of the gene and mRNA splicing, the mRNA is translated into a protein endogenous to the cell.

[0007] In one aspect, provided herein is a cell comprising a recombinant nucleic acid comprising a coding region and a non-coding region, wherein the non-coding region comprises a nucleic acid exogenous to the non-coding region, and wherein the coding region is the coding region of a gene, and the gene (i) is actin, ubiquitin, ribosomal gene, gene encoding a heat shock protein, rubisco, tubulin, TMM, FAMA, rbc-S, CAB2, Rac, GLP, PDX1, BiGSSP, Lhca3, SMB, GATA23, ARF, SIREO, Prx, TIP2, ET304, TobRB7, or a gene selected from Table 1; (ii) accounts for about 1% to about 20% of gene expression in the cell; (iii) is transcribed from a constitutive promoter, optionally wherein the promoter is specific or a plant organ or tissue, further optionally wherein the organ or tissue comprises a root, stem, fruit, seed, leaf, ground tissue, vascular tissue, or dermal tissue, or a combination of two or more thereof; or (iv) a combination of two or more of (i) to (iii). In some embodiments, the non-coding region comprises (i) an intron positioned between a first exon region of the coding region and a second exon region of the coding region, (ii) a 5′ non-coding region positioned adjacent to the coding region, or (iii) a 3′ non-coding region positioned adjacent to the coding region. In some embodiments, the gene encodes mRNA endogenous to the cell, and after transcription of the gene and mRNA splicing, the mRNA is translated into a protein endogenous to the cell. In some embodiments, the gene is constitutively expressed in the cell. In some embodiments, the nucleic acid exogenous to the non-coding region encodes a ribonucleic acid or a peptide. In some embodiments, the nucleic acid encodes the ribonucleic acid, and the ribonucleic acid specifically binds to (i) a target nucleic acid of Table 6, (ii) a target nucleic acid present in a pest of Table 6, (iii) a target nucleic acid of an organism of Table 6, (iv) a target nucleic acid exogenous or endogenous to the cell, (v) a target nucleic acid responsible for water acquisition, nutrient acquisition, disease control, or pest control, or any combination of two or more thereof, in the cell, (vi) a target nucleic acid comprises a regulatory element involved in: plant growth and development, yield, biotic stress, abiotic stress, or herbicide resistance, or any combination of two or more thereof, (vii) a target nucleic acid of an insect, bacteria, fungi, or worm, or a combination of two or more thereof, that is harmful to the cell, (viii) a target nucleic acid of an organism that causes a disease to the cell, or (ix) a combination of two or more of (i) to (viii). In some embodiments, the nucleic acid encodes the ribonucleic acid, and the nucleic acid comprises a sequence at least 80%, 81%, 82%, 83%, 84%, 85%, 86%, 87%, 88%, 89%, 90%, 91%, 92%, 93%, 94%, 95%, 96%, 97%, 98%, or 99% identical to a sequence of any one of the target gene sequences of Table 6; and/or comprises a sequence at least 80%, 81%, 82%, 83%, 84%, 85%, 86%, 87%, 88%, 89%, 90%, 91%, 92%, 93%, 94%, 95%, 96%, 97%, 98%, or 99% identical to at least 10 contiguous bases of any one of the target gene sequences of Table 6. In some embodiments, the nucleic acid encodes the peptide, and the peptide is (i) a peptide selected from Table 7, (ii) a peptide encoded by an mRNA sequence at least 80%, 81%, 82%, 83%, 84%, 85%, 86%, 87%, 88%, 89%, 90%, 91%, 92%, 93%, 94%, 95%, 96%, 97%, 98%, or 99% identical to a sequence of Table 8, (iii) a peptide that affects hormonal regulation, protection against a pathogen, protection against an insect, nitrogen fixation, nutrient acquisition, immunity induction, biotic stress, or abiotic stress, or a combination of two or more thereof, in the cell, or (iv) a combination of two or more of (i) to (iii). In some embodiments, the nucleic acid encodes the peptide, and the nucleic acid comprises a sequence at least 80%, 81%, 82%, 83%, 84%, 85%, 86%, 87%, 88%, 89%, 90%, 91%, 92%, 93%, 94%, 95%, 96%, 97%, 98%, or 99% identical to a sequence of Table 8. In some embodiments, the non-coding region comprises a nuclease recognition site, optionally wherein the nucleic recognition site comprises a protospacer adjacent motif (PAM). In some embodiments, the nucleic acid exogenous to the non-coding region is endogenous or exogenous to the cell. In some embodiments, the genome of the cell comprises the recombinant nucleic acid. In some embodiments, the nucleic acid exogenous to the non-coding region is about 10 to about 700 bases in length, or about less than 200 bases in length.

[0008] In one aspect, provided herein is a cell comprising a recombinant nucleic acid comprising a coding region and a non-coding region, wherein the non-coding region comprises a nucleic acid exogenous to the non-coding region, and wherein the nucleic acid exogenous to the non-coding region encodes a ribonucleic acid that specifically binds to (i) a target nucleic acid of Table 6, (ii) a target nucleic acid present in pest of Table 6, (iii) a target nucleic acid of an organism of Table 6, (iv) a target nucleic acid exogenous or endogenous to the cell, (v) a target nucleic acid responsible for water acquisition, nutrient acquisition, disease control, or pest control, or any combination of two or more thereof, in the cell, (vi) a target nucleic acid comprises a regulatory element involved in: plant growth and development, yield, biotic stress, abiotic stress, or herbicide resistance, or any combination of two or more thereof, (vii) a target nucleic acid of an insect, bacteria, fungi, or worm (e.g., larva of the insect, and nematode), or a combination of two or more thereof, that is harmful to the cell, (viii) a target nucleic acid of an organism that causes a disease to the cell, or (ix) a combination of two or more of (i) to (viii).

[0009] In one aspect, provided herein is a cell comprising a recombinant nucleic acid comprising a coding region and a non-coding region, wherein the non-coding region comprises a nucleic acid exogenous to the non-coding region, and wherein the nucleic acid exogenous to the non-coding region comprises a sequence at least 80%, 81%, 82%, 83%, 84%, 85%, 86%, 87%, 88%, 89%, 90%, 91%, 92%, 93%, 94%, 95%, 96%, 97%, 98%, or 99% identical to a sequence of any one of the target gene sequences of Table 6; of comprises a sequence at least 80%, 81%, 82%, 83%, 84%, 85%, 86%, 87%, 88%, 89%, 90%, 91%, 92%, 93%, 94%, 95%, 96%, 97%, 98%, or 99% identical to at least 10 contiguous bases of any one of the target gene sequences of Table 6.

[0010] In one aspect, provided herein is a cell comprising a recombinant nucleic acid comprising a coding region and a non-coding region, wherein the non-coding region comprises a nucleic acid exogenous to the non-coding region, and wherein the nucleic acid exogenous to the non-coding region encodes a peptide, and the peptide is (i) a peptide selected from Table 7, (ii) a peptide encoded by an mRNA sequence at least 80%, 81%, 82%, 83%, 84%, 85%, 86%, 87%, 88%, 89%, 90%, 91%, 92%, 93%, 94%, 95%, 96%, 97%, 98%, or 99% identical to a sequence of Table 8, (iii) a peptide that affects hormonal regulation, protection against a pathogen, protection against an insect, nitrogen fixation, nutrient acquisition, immunity induction, biotic stress, or abiotic stress, or a combination of two or more thereof, in the cell, or (iv) a combination of two or more of (i) to (iii).

[0011] In one aspect, provided herein is a cell comprising a recombinant nucleic acid comprising a coding region and a non-coding region, wherein the non-coding region comprises a nucleic acid exogenous to the non-coding region, and wherein the nucleic acid exogenous to the non-coding region comprises a sequence at least 80%, 81%, 82%, 83%, 84%, 85%, 86%, 87%, 88%, 89%, 90%, 91%, 92%, 93%, 94%, 95%, 96%, 97%, 98%, or 99% identical to a sequence of Table 8. In some embodiments, the non-coding region is positioned within, or adjacent to, a gene of the cell. In some embodiments, the gene is actin, ubiquitin, ribosomal gene, gene encoding a heat shock protein, rubisco, tubulin, TMM, FAMA, rbc-S, CAB2, Rac, GLP, PDX1, BiGSSP, Lhca3, SMB, GATA23, ARF, SIREO, Prx, TIP2, ET304, TobRB7, or a gene selected from Table 1. In some embodiments, the non-coding region is selected from Table 2. In some embodiments, the recombinant nucleic acid is positioned within the genome of the cell. In some embodiments, the cell is a plant cell, and optionally the plant is a plant of Table 9, and further optionally the plant cell is a ground tissue cell, a vascular tissue cell, or a dermal tissue cell. In some embodiments, the cell is not transgenic.

[0012] In one aspect, provided herein is a plant comprising the cell as described herein, optionally wherein the plant is a plant of Table 9. In some embodiments, the plant is resistant or more resistant to a pest, disease, or chemical, or a combination of two or more thereof, as compared to a plant that does comprise the cell with the recombinant nucleic acid. In some embodiments, the plant has an improved nutritional quality, increased crop yield, more efficient nutrient acquisition, or more efficient photosynthetic efficiency, or a combination of two or more thereof, as compared to a plant that does not comprise the cell with the recombinant nucleic acid.

[0013] In one aspect, provided herein is a seed of the plant as described herein.

[0014] In one aspect, provided herein is a method of reducing or eliminating expression of a target gene in the cell as described herein, the method comprising introducing into the non-coding region of the cell the nucleic acid exogenous to the non-coding region, wherein nucleic acid exogenous to the non-coding region encodes for a sequence that binds to mRNA of the target gene, thereby reducing or eliminating expression of the target gene.

[0015] In one aspect, provided herein is a method of regulating a target gene or peptide in the cell as described herein, the method comprising introducing into the non-coding region of the cell the nucleic acid exogenous to the non-coding region, wherein the nucleic acid exogenous to the non-coding region encodes for an amino acid sequence that is capable of regulating the target gene or peptide in the cell, thereby regulating the target gene or peptide in the cell.

[0016] In one aspect, provided herein is a method of introducing, increasing, or reducing a trait in the plant as described herein, the method comprising introducing into the non-coding region of the cell of the plant the nucleic acid exogenous to the non-coding region, wherein the nucleic acid exogenous to the non-coding region encodes for a sequence that binds to mRNA of a target gene, thereby introducing, increasing, or reducing the trait in the plant.

[0017] In one aspect, provided herein is a method of introducing, increasing, or reducing a trait in the plant as described herein, the method comprising introducing into the non-coding region of the cell of the plant the nucleic acid exogenous to the non-coding region, wherein the nucleic acid exogenous to the non-coding region encodes an amino acid sequence that regulates a target gene or peptide in the cell, thereby introducing, increasing or reducing the trait in the plant.

[0018] In one aspect, provided herein is a cell comprising a non-coding region, wherein the non-coding region comprises an endogenous or exogenous nucleic acid, optionally, wherein the non-coding region comprises (i) a modified (e.g., genetically edited) intron region positioned between a first exon region and a second exon region, (ii) a 5′ non-coding region, or (iii) a 3′ non-coding region, or (iv) at least two of (i)-(iii). In some embodiments, the nucleic acid is exogenous to the non-coding region and endogenous to the cell. In some embodiments, the nucleic acid is exogenous to the non-coding region and exogenous to the cell. In some embodiments, the non-coding region comprises the modified (e.g., genetically edited) intron region positioned between the first exon region and the second exon region, and wherein the first exon region and the second exon region are regions of a gene. In some embodiments, the modified (e.g., genetically edited) non-coding region comprises the 5′ non-coding region, and the 5′ non-coding region is upstream of a gene. In some embodiments, the modified (e.g., genetically edited) non-coding region comprises the 3′ non-coding region, and the 3′ non-coding region is downstream of a gene. In some embodiments, the modified (e.g., genetically edited) non-coding region is modified from an intron of a gene. In some embodiments, the gene is endogenous or exogenous to the cell. In some embodiments, the endogenous or exogenous nucleic acid is positioned within the non-coding region of the gene, or within a portion of the non-coding region of the gene. In some embodiments, the endogenous or exogenous nucleic acid does not replace any nucleobases of the non-coding region of the gene. In some embodiments, the endogenous or exogenous nucleic acid replaces 1-10, 1-20, 10-30, or 10-40 nucleobases of the non-coding region of the gene. In some embodiments, the first modified (e.g., genetically edited) intron region comprises a first portion of the intron of the gene, the endogenous or exogenous nucleic acid, and a second portion of the intron of the gene. In some embodiments, the intron of the gene is selected from Table 2. In some embodiments, the gene is selected from the examples shown in Table 1. In some embodiments, the gene comprises a plurality of introns. In some embodiments, the plurality of introns is about 2, 3, 4, 5, 6, 7, 8, 9, 10, 11, 12, 13, 14, 15, 16, 17, 18, 19, 20 introns (e.g., as exemplified by genes from Table 1). In some embodiments, the non-coding region is present in the first, second, third, fourth, fifth, sixth, seventh, eighth, nineth, tenth, eleventh, twelfth, thirteenth, fourteenth, fifteenth, sixteenth, seventeenth, eighteenth, nineteenth, or twentieth intron of the gene, as applicable. In some embodiments, the first exon region and the second exon region are regions of the gene. In some embodiments, the non-coding region comprises the modified (e.g., genetically edited) intron region positioned between the first exon region and the second exon region, and wherein the first exon region and the second exon region are regions of a gene. In some embodiments, the non-coding region comprises the 5′ non-coding region, and the 5′ non-coding region is upstream of a gene. In some embodiments, the non-coding region comprises the 3′ non-coding region, and the 3′ non-coding region is downstream of a gene. In some embodiments, the first exon region and the second exon region are regions of a gene. In some embodiments, the gene is endogenous or exogenous to the cell. In some embodiments, the gene is constitutively expressed. In some embodiments, the gene is expressed in a specific tissue or organ.

[0019] In some embodiments, the cell is a plant cell, and the tissue or organ comprises a root, stem, fruit, seed, leaf, ground tissue, vascular tissue, or dermal tissue, or a combination of two or more thereof. In some embodiments, the gene is expressed at a range of 1-5%, 1-10%, 5-15%, or 5-20% of the total expressed genes in the cell (e.g., as determined by mRNA expression profiling of the said cell). In some embodiments, upon transcription and mRNA splicing, the native mRNA of the gene is translated into the native protein of the gene. In some embodiments, the gene encodes a native protein. In some embodiments, the native protein is actin, ubiquitin, ribosomal protein, heat shock protein, rubisco, tubulin, TMM, FAMA, rbc-S, CAB2, Rac, GLP, PDX1, BiGSSP, Lhca3, SMB, GATA23, ARF, SIREO, Prx, TIP2, ET304, RB7, or any other protein expressed from a gene of Table 1. In some embodiments, the gene is selected from Table 1.

[0020] In some embodiments, the endogenous or exogenous nucleic acid is transcribed from a promoter. In some embodiments, the promoter is a promoter native to the gene. In some embodiments, the endogenous or exogenous nucleic acid is transcribed from a promoter. In some embodiments, the promoter is a constitutive promoter. In some embodiments, the promoter is specific for a plant organ. In some embodiments, the plant organ is a root, stem, fruit, seed, or leaf. In some embodiments, the promoter is specific to a plant tissue. In some embodiments, the plant tissue is a ground tissue, vascular tissue, or dermal tissue. In some embodiments, the promoter is an endogenous promoter of the cell. In some embodiments, the endogenous promoters of the cell drive the expression of one or more genes selected from Table 1.

[0021] In some embodiments, the non-coding region comprises one or more nucleases recognition sites. In some embodiments, at least one of the one or more nuclease recognition sites is selected from Table 3.

[0022] In some embodiments, the endogenous or exogenous nucleic acid is about 10 to about 700 bases in length, about 10 to about 600 bases, about 10 to about 500 bases, about 10 to about 400 bases, about 10 to about 300 bases, about 10 to about 200 bases in length, about 10 to about 180 bases, about 10 to about 160 bases, about 10 to about 140 bases, about 10 to about 120 bases, about 10 to about 110 bases, or about 10 to about 100 bases in length. In some embodiments, the endogenous or exogenous nucleic acid is less than 200 bases in length. In some embodiments, the endogenous or exogenous nucleic acid is positioned within the genome of the cell. In some embodiments, the endogenous or exogenous nucleic acid is not present on a plasmid.

[0023] In some embodiments, the endogenous or exogenous nucleic acid encodes a micro RNA (miRNA). In some embodiments, the miRNA is expressed as a short tandem target mimic (STTM) comprising two copies of partially complementary RNA linked by a spacer. In some embodiments, the spacer has a length of about 6 to about 60 nucleobases. In some embodiments, each of the two copies of partially complementary RNA have a length of about 10 to about 30 nucleobases. In some embodiments, the miRNA specifically binds to a target nucleic acid. In some embodiments, the target nucleic acid is exogenous to the cell. In some embodiments, the target nucleic acid is endogenous to the cell. In some embodiments, the target nucleic acid is responsible for water acquisition, nutrient acquisition, disease control, or pest control, or any combination thereof. In some embodiments, the target nucleic acid comprises a regulatory element involved in: plant growth and development, yield, biotic stress, abiotic stress, or herbicide resistance, or any combination thereof. In some embodiments, the target nucleic acid is from an insect, bacteria, fungi, worm (e.g., larva of the insect, and nematode), or a combination thereof, that is harmful to the cell. In some embodiments, the target nucleic acid is present in a target pest selected from Table 6. In some embodiments, the target nucleic acid is selected from the target genes in Table 6. In some embodiments, the target nucleic acid is from an organism that causes a disease to the cell. In some embodiments, the organism is any one selected from Table 6. In some embodiments, the target nucleic acid is a target mRNA. In some embodiments, the target mRNA comprises a sequence at least 70% identical to a sequence of Table 6. In some embodiments, the target mRNA is encoded from a target gene. In some embodiments, the target gene is selected from a gene shown in Table 6. In some embodiments, the target gene comprises a sequence at least 70% identical to a sequence of Table 6. In some embodiments, the endogenous or exogenous nucleic acid comprises a sequence at least 70% identical to a sequence of any one of the target gene sequences of Table 6, or the endogenous or exogenous nucleic acid comprises a sequence at least 80% identical to at least 10 contiguous bases of any one of the target gene sequences of Table 6.

[0024] In some embodiments, the endogenous or exogenous nucleic acid encodes a peptide. In some embodiments, the coding region for the peptide is flanked by a 5′ ribosomal binding site (RBS). In some embodiments, the RBS is 4-80 bases in length. In some embodiments, the peptide affects one or more biological functions of the cell selected from: hormonal regulation, protection against a pathogen, protection against an insect, nitrogen fixation, nutrient acquisition, immunity induction, biotic stress, or abiotic stress, or a combination thereof. In some embodiments, the peptide is 2-80 amino acids in length, 3-80, 4-80, 5-80, 6-80, 7-80, 8-80, 9-80, 10-80, 20-80, 30-80, 40-80, 50-80, 60-80, 70-80 or 1-80 amino acids in length. In some embodiments, the peptide is selected from Table 7. In some embodiments, the peptide is encoded by a sequence at least 80% identical to a sequence of Table 8. In some embodiments, the endogenous or exogenous nucleic acid comprises a sequence at least 80% identical to a sequence of Table 8.

[0025] In another aspect, provided herein is a cell comprising an endogenous or exogenous micro RNA (miRNA). In some embodiments, the miRNA is endogenous to the cell but exogenous to the location of the miRNA in the cell. In some embodiments, the miRNA is exogenous to the cell. In some embodiments, the endogenous or exogenous miRNA harbors an artificial micro RNA (amiRNA). In some embodiments, the endogenous or exogenous miRNA is expressed as a short tandem target mimic (STTM) comprising two copies of partially complementary RNA linked by a spacer. In some embodiments, the spacer has a length of about 6 to about 60 nucleobases. In some embodiments, each of the two copies of partially complementary RNA have a length of about 10 to about 30 nucleobases. In some embodiments, the endogenous or exogenous miRNA is a precursor miRNA. In some embodiments, the endogenous or exogenous miRNA is a mature miRNA. In some embodiments, the mature miRNA comprises about 21-22 nucleotides. In some embodiments, the miRNA specifically binds to a target nucleic acid. In some embodiments, the target nucleic acid is endogenous or exogenous to the cell. In some embodiments, the target nucleic acid is endogenous to the cell. In some embodiments, the target nucleic acid is exogenous to the cell. In some embodiments, the target nucleic acid is responsible for water acquisition, nutrient acquisition, disease control, or pest control, or any combination thereof. In some embodiments, the target nucleic acid comprises a regulatory element involved in: plant growth and development, yield, biotic stress, abiotic stress, or herbicide resistance, or any combination thereof. In some embodiments, the target nucleic acid is from an insect, bacteria, fungi, nematode or a worm, or a combination thereof, that is harmful to the cell. In some embodiments, the target nucleic acid is present in a target pest selected from Table 6. In some embodiments, the target nucleic acid is selected from the target genes in Table 6. In some embodiments, the target nucleic acid is from an organism that causes a disease to the cell. In some embodiments, the organism is any one selected from Table 6. In some embodiments, the target nucleic acid is a target mRNA. In some embodiments, the target mRNA comprises a sequence at least 70% identical to a sequence of Table 6. In some embodiments, the target mRNA is encoded from a target gene. In some embodiments, the target gene is selected from a gene of Table 6. In some embodiments, the target gene comprises a sequence at least 70% identical to a sequence of Table 6.

[0026] In another aspect, provided herein is a cell comprising an endogenous or exogenous mRNA encoding a peptide. In some embodiments, the mRNA is endogenous to the cell but exogenous to the location of the mRNA in the cell. In some embodiments, the mRNA is exogenous to the cell. In some embodiments, the endogenous or exogenous mRNA is flanked by a 5′ribosomal binding site (RBS). In some embodiments, the RBS is 4-80 base pair in length. In some embodiments, the peptide affects one or more properties of the cell selected from: hormonal regulation, protection against a pathogen, protection against an insect, nitrogen fixation, nutrient acquisition, immunity induction, biotic stress, or abiotic stress, or a combination thereof. In some embodiments, the peptide is 2-80 amino acids in length, 3-80, 4-80, 5-80, 6-80, 7-80, 8-80, 9-80, 10-80, 20-80, 30-80, 40-80, 50-80, 60-80, 70-80 or 1-80 amino acids in length. In some embodiments, the peptide is selected from Table 7. In some embodiments, the peptide is encoded by a sequence at least 80% identical to a sequence of Table 8. In some embodiments, the mRNA comprises a sequence at least 80% identical to a sequence of Table 8.

[0027] In another aspect, provided herein is a cell comprising an endogenous or exogenous peptide. In some embodiments, the peptide is endogenous to the cell. In some embodiments, the peptide is exogenous to the cell. In some embodiments, the peptide affects one or more properties of the cell, such as: hormonal regulation, protection against a pathogen, protection against an insect, nitrogen fixation, nutrient acquisition, immunity induction, biotic stress, or abiotic stress, and a combination of two or more thereof. In some embodiments, the peptide is 2-80 amino acids in length, 3-80, 4-80, 5-80, 6-80, 7-80, 8-80, 9-80, 10-80, 20-80, 30-80, 40-80, 50-80, 60-80, 70-80 or 1-80 amino acids in length. In some embodiments, the peptide is selected from Table 7. In some embodiments, the peptide is encoded by a sequence at least 80% identical to a sequence of Table 8. In some embodiments, the cell is a plant cell. In some embodiments, the plant is a dicotyledonous plant. In some embodiments, the dicotyledonous plant is selected from Table 9. In some embodiments, the plant is a monocotyledonous plant. In some embodiments, the monocotyledonous plant is selected from Table 9. In some embodiments, the plant cell is a ground tissue cell. In some embodiments, the tissue cell is a parenchyma, collenchyma, or sclerenchyma cell. In some embodiments, the plant cell is a vascular tissue cell. In some embodiments, the tissue cell is a tracheid, vessel element, sieve tube cell, or companion cell. In some embodiments, the plant cell is a dermal tissue cell. In some embodiments, the tissue cell is an epidermal, guard cell, or trichome. In some embodiments, the cell is not transgenic. In some embodiments, the endogenous or exogenous nucleic acid is introduced into the cell via non-homologous recombination. In some embodiments, the endogenous or exogenous nucleic acid is introduced into the cell via non-homologous end-joining. In some embodiments, the endogenous or exogenous nucleic acid is introduced into the cell via homology-independent targeted integration (HITI). In some embodiments, the endogenous or exogenous nucleic acid is introduced into the cell via nuclease gene editing. In some embodiments, the nuclease gene editing comprises CRISPR-Cas gene editing.

[0028] In another aspect, provided herein is a host comprising any cell described herein. In some embodiments, the host is a plant. In some embodiments, the plant is a dicotyledonous plant. In some embodiments, the dicotyledonous plant is selected from Table 9. In some embodiments, the plant is a monocotyledonous plant. In some embodiments, the monocotyledonous plant is selected from Table 9. In some embodiments, the plant is not transgenic.

[0029] In another aspect, provided herein is a seed from any plant described herein.

[0030] In another aspect, provided herein is a plant obtained from any seed described herein.

[0031] In some embodiments, a plant described herein has one or more traits. In some embodiments, the one or more traits comprise hormonal regulation, protection against a pathogen, protection against an insect, nitrogen fixation, nutrient acquisition, immunity induction, biotic stress, or abiotic stress, or a combination thereof. In some embodiments, the trait is conferred by an endogenous or exogenous nucleic acid and/or peptide. In some embodiments, the endogenous or exogenous nucleic acid and/or peptide provides hormonal regulation, protection against a pathogen, protection against an insect, nitrogen fixation, nutrient acquisition, immunity induction, biotic stress, or abiotic stress, or a combination thereof. In some embodiments, the trait comprises resistance to a pest. In some embodiments, the pest is an insect, bacteria, fungi, worm (e.g., larva of the insect, and nematode), or a combination thereof. In some embodiments, the pest is selected from Table 6. In some embodiments, the resistance is due to antibiosis (growth and multiplication of the pest is inhibited), antixenosis (the pest is repelled by the plant), or tolerance (the plant is able to withstand or recover from damage by the pest). In some embodiments, the resistant plant has a superior yield as compared to a plant that does not comprise the cell with an endogenous or exogenous nucleic acid and/or peptide, when the plants are both under attack by the pest. In some embodiments, the trait comprises resistance to a disease. In some embodiments, the disease is caused by a pest. In some embodiments, the pest is an insect, bacteria, fungi, worm (e.g., larva of the insect, and nematode), or a combination thereof. In some embodiments, the pest is selected from Table 6. In some embodiments, the resistance is due to antibiosis (growth and multiplication of the pest is inhibited), antixenosis (the pest is repelled by the plant), or tolerance (plant is able to withstand or recover from damage by the pest). In some embodiments, the resistant plant has a superior yield as compared to a plant that does not comprise the cell with an exogenous nucleic acid and/or peptide, when the plants are both exposed to the disease. In some embodiments, the trait comprises resistance to a chemical. In some embodiments, the chemical is a weed control chemical. In some embodiments, the weed control chemical is a growth inhibitor. In some embodiments, the chemical is a herbicide. In some embodiments, the herbicide is 2,4-D (2,4-dichlorophenoxy acetic acid), Aminopyralid, Atrazine, Clopyralid, Dicamba, Glufosinate ammonium, Fluazifop, Fluroxypyr, Glyphosate, Imazapyr, Imazapic, Imazamox, Linuron, MCPA (2-methyl-4-chlorophenoxyacetic acid), Metolachlor, Paraquat, Pendimethalin, Picloram, Sodium chlorate, Triclopyr, Sulfonylureas (e.g., Flazasulfuron and Metsulfuron-methyl), or a combination thereof. In some embodiments, the trait confers an improved nutritional and/or visual quality as compared to a plant that does not comprise the cell with an exogenous nucleic acid and/or peptide, (e.g., measurable using a spectrometric method). In some embodiments, the trait confers an increase in crop yield as compared to a plant that does not comprise the cell with an exogenous nucleic acid and/or peptide. In some embodiments, the trait confers an ability to acquire a nutrient (e.g., nitrogen, phosphorus, potassium and/or plant micronutrients) at least 10% more efficiently as compared to a plant that does not comprise the cell with an exogenous nucleic acid and/or peptide (e.g., measurable using a spectrophotometric method). In some embodiments, the trait confers an ability to acquire water at least 10% more efficiently as compared to a plant that does not comprise the cell with an exogenous nucleic acid and/or peptide (e.g., measurable using the plant fresh weight when they were subjected to, for example, drought stress). In some embodiments, the trait confers at least 10% improved photosynthetic efficiency as compared to a plant that does not comprise the cell with an exogenous nucleic acid and/or peptide (e.g., measurable using, for example, a gas-exchange analyzer).

[0032] In another aspect, provided herein is a donor nucleic acid sequence comprising an endogenous or exogenous nucleic acid. In some embodiments, the endogenous or exogenous nucleic acid is exogenous to the donor nucleic acid sequence. In some embodiments, the endogenous or exogenous nucleic acid is about 10 to about 700 bases in length, about 10 to about 600 bases in length, about 10 to about 500 bases in length, about 10 to about 400 bases in length, about 10 to about 300 bases in length, about 10 to about 200 bases in length, about 10 to about 180 bases, about 10 to about 160 bases, about 10 to about 140 bases, about 10 to about 120 bases, about 10 to about 110 bases, or about 10 to about 100 bases in length. In some embodiments, the endogenous or exogenous nucleic acid is less than 200 bases in length. In some embodiments, the endogenous or exogenous nucleic acid encodes a micro RNA (miRNA). In some embodiments, the miRNA is expressed as a short tandem target mimic (STTM) comprising two copies of partially complementary RNA linked by a spacer. In some embodiments, the spacer has a length of about 6 to about 60 nucleobases. In some embodiments, each of the two copies of partially complementary RNA have a length of about 10 to about 30 nucleobases. In some embodiments, the miRNA specifically binds to a target nucleic acid. In some embodiments, the target nucleic acid is responsible for water acquisition, nutrient acquisition, disease control, or pest control, or any combination thereof. In some embodiments, the target nucleic acid comprises a regulatory element involved in plant growth and development, yield, biotic stress, abiotic stress, or herbicide resistance, or any combination thereof. In some embodiments, the target nucleic acid is from an insect, bacteria, fungi, worm (e.g., larva of the insect, and nematode), or a combination thereof, that is harmful to a cell. In some embodiments, the target nucleic acid is present in a target pest selected from Table 6. In some embodiments, the target nucleic acid is selected from the target genes in Table 6. In some embodiments, the target nucleic acid is from an organism that causes a disease to a cell. In some embodiments, the organism is any one selected from Table 6. In some embodiments, the target nucleic acid is a target mRNA. In some embodiments, the target mRNA comprises a sequence at least 70% identical to a sequence of Table 6. In some embodiments, the target mRNA is encoded from a target gene. In some embodiments, the target gene is selected from a gene of Table 6. In some embodiments, the target gene comprises a sequence at least 70% identical to a sequence of Table 6. In some embodiments, the endogenous or exogenous nucleic acid comprises a sequence at least 70% identical to a sequence of any one of the target gene sequences of Table 6, or the endogenous or exogenous nucleic acid comprises a sequence at least 80% identical to at least 10 contiguous bases of any one of the target gene sequences of Table 6. In some embodiments, the endogenous or exogenous nucleic acid encodes a peptide. In some embodiments, the coding region for the peptide is flanked by a 5′ribosomal binding site (RBS). In some embodiments, the RBS is 4-20 bases in length. In some embodiments, the peptide affects one or more properties of a cell selected from: hormonal regulation, protection against a pathogen, protection against an insect, nitrogen fixation, nutrient acquisition, immunity induction, biotic stress, or abiotic stress, or a combination thereof. In some embodiments, the peptide is 2-80 amino acids in length, 3-80, 4-80, 5-80, 6-80, 7-80, 8-80, 9-80, 10-80, 20-80, 30-80, 40-80, 50-80, 60-80, 70-80 or 1-80 amino acids in length. In some embodiments, the peptide is selected from Table 7. In some embodiments, the peptide is encoded by a sequence at least 80% identical to a sequence of Table 8. In some embodiments, the endogenous or exogenous nucleic acid comprises a sequence at least 80% identical to a sequence of Table 8. In some embodiments, the donor nucleic acid is a blunt linear double-stranded oligodeoxynucleotide (dsODN). In some embodiments, the donor nucleic acid is a single-stranded oligodeoxynucleotide (ssODN). In some embodiments, the donor nucleic acid is a plasmid donor. In some embodiments, the donor nucleic acid comprises one or two nuclease recognition sites. In some embodiments, the donor nucleic acid comprises 2 nucleotides of phosphorothioate linkages at the 5′- and 3′-ends of both DNA strands of the exogenous nucleic acid. In some embodiments, the donor nucleic acid is phosphorylated at the 5′ end of both strands of the exogenous nucleic acid. In some embodiments, the non-coding region comprises an intron and the intron comprises the endogenous or exogenous nucleic acid. In some embodiments, the endogenous or exogenous nucleic acid is exogenous to the intron. In some embodiments, the non-coding region comprises a 5′ non-coding region, and the 5′ non-coding region comprises the endogenous or exogenous nucleic acid. In some embodiments, the endogenous or exogenous nucleic acid is exogenous to the 5′ non-coding region. In some embodiments, the non-coding region comprises a 3′ non-coding region, and the 3′ non-coding region comprises the endogenous or exogeneous nucleic acid. In some embodiments, the endogenous or exogenous nucleic acid is exogenous to the 3′ non-coding region.

[0033] Further provided is a kit comprising any donor nucleic acid herein, and a nucleic acid sequence encoding a DNA nuclease. In some embodiments, the DNA nuclease is as exemplified in Example 1. In some embodiments, the DNA nuclease is a CRISPR-associated nuclease. In some embodiments, the CRISPR-associated nuclease comprises Cas9. In some embodiments, the nucleic acid sequence encoding the DNA nuclease further encodes one or more guide RNA (gRNA). In some embodiments, the one or more gRNA are selected from Table 4. In some embodiments, the DNA nuclease is a Transcription Activator-Like Effector Nuclease (TALEN). In some embodiments, the DNA nuclease is connected to a sequence encoding VirD2 (e.g., Table 5). In some embodiments, the non-coding region comprises an intron and the intron comprises the endogenous or exogenous nucleic acid. In some embodiments, the endogenous or exogenous nucleic acid is exogenous to the intron. In some embodiments, the non-coding region comprises a 5′ non-coding region, and the 5′ non-coding region comprises the endogenous or exogenous nucleic acid. In some embodiments, the endogenous or exogenous nucleic acid is exogenous to the 5′ non-coding region. In some embodiments, the non-coding region comprises a 3′ non-coding region, and the 3′ non-coding region comprises the endogenous or exogenous nucleic acid. In some embodiments, the endogenous or exogenous nucleic acid is exogenous to the 3′ non-coding region.

[0034] Further provided is a combination comprising any donor nucleic acid herein, or kit herein, and a cell comprising an acceptor non-coding region for insertion of the donor nucleic acid sequence. In some embodiments, the endogenous or exogenous nucleic acid of the donor nucleic acid sequence is exogenous to the cell. In some embodiments, the endogenous or exogenous nucleic acid of the donor nucleic acid sequence is endogenous to the cell. In some embodiments, the cell is a plant cell. In some embodiments, the plant is a dicotyledonous plant. In some embodiments, the dicotyledonous plant is selected from Table 9. In some embodiments, the plant is a monocotyledonous plant. In some embodiments, the monocotyledonous plant is selected from Table 9. In some embodiments, the plant cell is a ground tissue cell. In some embodiments, the tissue cell is a parenchyma, collenchyma, or sclerenchyma cell. In some embodiments, the plant cell is a vascular tissue cell. In some embodiments, the tissue cell is a tracheid, vessel element, sieve tube cell, or companion cell. In some embodiments, the plant cell is a dermal tissue cell. In some embodiments, the tissue cell is an epidermal, guard cell, or trichome. In some embodiments, the cell is not transgenic. In some embodiments, the endogenous or exogenous nucleic acid is introduced into the cell via non-homologous recombination. In some embodiments, the endogenous or exogenous nucleic acid is introduced into the cell via non-homologous end-joining. In some embodiments, the endogenous or exogenous nucleic acid is introduced into the cell via homology-independent targeted integration (HITI). In some embodiments, the endogenous or exogenous nucleic acid is introduced into the cell via nuclease gene editing. In some embodiments, the nuclease gene editing comprises CRISPR-Cas gene editing. In some embodiments, the non-coding region comprises an intron and the intron comprises the endogenous or exogenous nucleic acid. In some embodiments, the endogenous or exogenous nucleic acid is exogenous to the intron. In some embodiments, the non-coding region comprises a 5′ non-coding region, and the 5′ non-coding region comprises the endogenous or exogenous nucleic acid. In some embodiments, the endogenous or exogenous nucleic acid is exogenous to the 5′ non-coding region. In some embodiments, the non-coding region comprises a 3′ non-coding region, and the 3′ non-coding region comprises the endogenous or exogeneous nucleic acid. In some embodiments, the endogenous or exogenous nucleic acid is exogenous to the 3′ non-coding region.

[0035] Further provided is a method of generating a cell with a modified (e.g., genetically edited) non-coding region, the method comprising introducing into the cell any donor nucleic acid herein, or any kit herein. In some embodiments, the modified (e.g., genetically edited) non-coding region comprises the endogenous or exogenous nucleic acid. Further provided is a method of generating a cell comprising a modified (e.g., genetically edited) non-coding region, the method comprising introducing an endogenous or exogenous nucleic acid into a non-coding of a gene in the cell. In some embodiments, the cell is a plant cell. In some embodiments, the endogenous or exogenous nucleic acid is introduced via non-homologous recombination. In some embodiments, the endogenous or exogenous nucleic acid is introduced via non-homologous end-joining. In some embodiments, the endogenous or exogenous nucleic acid is introduced via homology-independent targeted integration (HITI). In some embodiments, the endogenous or exogenous nucleic acid is introduced via nuclease gene editing. In some embodiments, the nuclease gene editing comprises CRISPR-Cas gene editing. In some embodiments, the endogenous or exogenous nucleic acid is exogenous to the donor nucleic acid. In some embodiments, the endogenous or exogenous nucleic acid is endogenous to the donor nucleic acid. In some embodiments, the endogenous or exogenous nucleic acid is exogenous to the cell. In some embodiments, the endogenous or exogenous nucleic acid is endogenous to the cell.

[0036] In another aspect, provided herein is a method of reducing or eliminating expression of a target gene in a cell, the method comprising introducing into a non-coding region of the cell an endogenous or exogenous nucleic acid, wherein the endogenous or exogenous nucleic acid encodes for a sequence that is capable of binding to mRNA of the target gene, thereby reducing or eliminating expression of the target gene. In some embodiments, the endogenous or exogenous nucleic acid is exogenous to the cell. In some embodiments, the endogenous or exogenous nucleic acid is endogenous to the cell.

[0037] In another aspect, provided herein is a method of regulating a target gene or peptide in a cell, the method comprising introducing, e.g., by gene editing, into a non-coding region of the cell an endogenous or exogenous nucleic acid, wherein the endogenous or exogenous nucleic acid encodes for an amino acid sequence that is capable of regulating the target gene or peptide in the cell, thereby regulating the target gene or peptide in the cell. In some embodiments, the endogenous or exogenous nucleic acid is exogenous to the cell. In some embodiments, the endogenous or exogenous nucleic acid is endogenous to the cell.

[0038] In another aspect, provided herein is a method of introducing, increasing, or reducing a trait in a host, the method comprising introducing, e.g., by gene editing, into a non-coding region of a cell of the host an endogenous or exogenous nucleic acid, wherein the endogenous or exogenous nucleic acid encodes for a sequence that is capable of binding to mRNA of a target gene, thereby introducing, increasing, or reducing a trait in the host. In some embodiments, the endogenous or exogenous nucleic acid is exogenous to the cell. In some embodiments, the endogenous or exogenous nucleic acid is endogenous to the cell.

[0039] In another aspect, provided herein is a method of introducing, increasing, or reducing a trait in a host, the method comprising introducing, e.g., by gene editing, into a non-coding region of a cell of the host an endogenous or exogenous nucleic acid, wherein the endogenous or exogenous nucleic acid encodes for an amino acid sequence that is capable of regulating a target gene or peptide in the cell, thereby introducing, increasing or reducing a trait in the host. In some embodiments, the endogenous or exogenous nucleic acid is exogenous to the cell. In some embodiments, the endogenous or exogenous nucleic acid is endogenous to the cell.

[0040] In some embodiments, the host is a plant. In some embodiments, the plant is a dicotyledonous plant. In some embodiments, the dicotyledonous plant is selected from Table 9. In some embodiments, the plant is a monocotyledonous plant. In some embodiments, the monocotyledonous plant is selected from Table 9. In some embodiments, the plant is not transgenic. In some embodiments, the trait comprises hormonal regulation, protection against a pathogen, protection against an insect, nitrogen fixation, nutrient acquisition, immunity induction, biotic stress, or abiotic stress, or a combination thereof. In some embodiments, the trait comprises resistance to a pest. In some embodiments, the pest is an insect, bacteria, fungi, worm (e.g., larva of the insect, and nematode), or a combination thereof. In some embodiments, the pest is selected from Table 6. In some embodiments, the resistance is due to antibiosis (growth and multiplication of the pest is inhibited), antixenosis (the pest is repelled by the plant), or tolerance (plant is able to withstand or recover from damage by the pest). In some embodiments, the host has a superior yield as compared to a host that does not comprise the endogenous or exogenous nucleic acid, when the hosts are both under attack by the pest. In some embodiments, the trait comprises resistance to a disease. In some embodiments, the disease is caused by a pest. In some embodiments, the pest is an insect, bacteria, fungi, worm (e.g., larva of the insect, and nematode), or a combination thereof. In some embodiments, the pest is selected from Table 6. In some embodiments, the resistance is due to antibiosis (growth and multiplication of the pest is inhibited), antixenosis (the pest is repelled by the plant), or tolerance (plant is able to withstand or recover from damage by the pest). In some embodiments, the resistant host has a superior yield as compared to a host that does not comprise the cell of any previous embodiment, when the hosts are both exposed to the disease. In some embodiments, the trait comprises resistance to a chemical. In some embodiments, the chemical is a weed control chemical. In some embodiments, the weed control chemical is a growth inhibitor. In some embodiments, the chemical is an herbicide. In some embodiments, the herbicide is 2,4-D (2,4-dichlorophenoxy acetic acid), Aminopyralid, Atrazine, Clopyralid, Dicamba, Glufosinate ammonium, Fluazifop, Fluroxypyr, Glyphosate, Imazapyr, Imazapic, Imazamox, Linuron, MCPA (2-methyl-4-chlorophenoxyacetic acid), Metolachlor, Paraquat, Pendimethalin, Picloram, Sodium chlorate, Triclopyr, Sulfonylureas (e.g., Flazasulfuron and Metsulfuron-methyl), or a combination thereof. In some embodiments, the trait confers an improved nutritional and/or visual quality as compared to a host that does not comprise the exogenous nucleic acid (e.g., measurable using a spectrometric method). In some embodiments, the trait confers an increase in crop yield as compared to a plant that does not comprise the exogenous nucleic acid. In some embodiments, the trait confers an ability to acquire a nutrient (e.g., nitrogen, phosphorus, potassium and/or plant micronutrients) at least 10% more efficiently as compared to a host that does not comprise the endogenous or exogenous nucleic acid (e.g., measurable using a spectrophotometric or spectrometric method). In some embodiments, the trait confers an ability to acquire water at least 10% more efficiently as compared to a host that does not comprise the endogenous or exogenous nucleic acid (e.g., measurable using the host fresh weight when they were subjected to, for example, drought stress). In some embodiments, the trait confers at least 10% improved photosynthetic efficiency as compared to a host that does not comprise the exogenous nucleic acid (e.g., measurable using, for example, a gas-exchange analyzer). In some embodiments, the endogenous or exogenous nucleic acid is about 10 to about 700 bases, about 10 to about 600 bases in length, about 10 to about 500 bases in length, about 10 to about 400 bases in length, about 10 to about 300 bases in length, about 10 to about 200 bases in length, about 10 to about 180 bases, about 10 to about 160 bases, about 10 to about 140 bases, about 10 to about 120 bases, about 10 to about 110 bases, or about 10 to about 100 bases in length. In some embodiments, the endogenous or exogenous nucleic acid is less than 200 bases in length. In some embodiments, the endogenous or exogenous nucleic acid encodes a micro RNA (miRNA). In some embodiments, the miRNA is expressed as a short tandem target mimic (STTM) comprising two copies of partially complementary RNA linked by a spacer. In some embodiments, the spacer has a length of about 6 to about 60 nucleobases. In some embodiments, each of the two copies of partially complementary RNA have a length of about 10 to about 30 nucleobases. In some embodiments, the miRNA specifically binds to a target nucleic acid. In some embodiments, the target nucleic acid is responsible for water acquisition, nutrient acquisition, disease control, or pest control, or any combination thereof. In some embodiments, the target nucleic acid comprises a regulatory element involved in: plant growth and development, yield, biotic stress, abiotic stress, or herbicide resistance, or any combination thereof. In some embodiments, the target nucleic acid is from an insect, bacteria, fungi, worm (e.g., larva of the insect, and nematode), or a combination thereof, that is harmful to a cell. In some embodiments, the target nucleic acid is present in a target pest selected from Table 6. In some embodiments, the target nucleic acid is selected from the target genes in Table 6. In some embodiments, the target nucleic acid is from an organism that causes a disease to a cell. In some embodiments, the organism is any one selected from Table 6. In some embodiments, the target nucleic acid is a target mRNA. In some embodiments, the target mRNA comprises a sequence at least 70% identical to a sequence of Table 6. In some embodiments, the target mRNA is encoded from a target gene. In some embodiments, the target gene is selected from a gene of Table 6. In some embodiments, the target gene comprises a sequence at least 70% identical to a sequence of Table 6. In some embodiments, the endogenous or exogenous nucleic acid comprises a sequence at least 70% identical to a sequence of any one of the target gene sequences of Table 6, or the endogenous or exogenous nucleic acid comprises a sequence at least 80% identical to at least 10 contiguous bases of any one of the target gene sequences of Table 6. In some embodiments, the endogenous or exogenous nucleic acid encodes a peptide. In some embodiments, the endogenous or exogenous nucleic acid is flanked by a 5′ribosomal binding site (RBS). In some embodiments, the RBS is 4-20 bases in length. In some embodiments, the peptide affects one or more property of a cell selected from: hormonal regulation, protection against a pathogen, protection against an insect, nitrogen fixation, nutrient acquisition, immunity induction, biotic stress, or abiotic stress, or a combination thereof. In some embodiments, the peptide is 2-80 amino acids in length, 3-80, 4-80, 5-80, 6-80, 7-80, 8-80, 9-80, 10-80, 20-80, 30-80, 40-80, 50-80, 60-80, 70-80 or 1-80 amino acids in length. In some embodiments, the peptide is selected from Table 7. In some embodiments, the peptide is encoded by a sequence at least 80% identical to a sequence of Table 8. In some embodiments, the endogenous or exogenous nucleic acid comprises a sequence at least 80% identical to a sequence of Table 8. In some embodiments, the cell is a plant cell. In some embodiments, the plant is a dicotyledonous plant. In some embodiments, the dicotyledonous plant is selected from Table 9. In some embodiments, the plant is a monocotyledonous plant. In some embodiments, the monocotyledonous plant is selected from Table 9. In some embodiments, the plant cell is a ground tissue cell. In some embodiments, the tissue cell is a parenchyma, collenchyma, or sclerenchyma cell. In some embodiments, the plant cell is a vascular tissue cell. In some embodiments, the tissue cell is a tracheid, vessel element, sieve tube cell, or companion cell. In some embodiments, the plant cell is a dermal tissue cell. In some embodiments, the tissue cell is a epidermal, guard cell, or trichome. In some embodiments, the cell is not transgenic. In some embodiments, the endogenous or exogenous nucleic acid is exogenous to the cell. In some embodiments, the endogenous or exogenous nucleic acid is endogenous to the cell.

[0041] In any of the embodiments herein, the non-coding region comprises an intron and the intron comprises the endogenous or exogenous nucleic acid. In some embodiments, the endogenous or exogenous nucleic acid is exogenous to the intron. In any of the embodiments herein, the non-coding region comprises a 5′ non-coding region, and the 5′ non-coding region comprises the endogenous or exogenous nucleic acid. In some embodiments, the endogenous or exogenous nucleic acid is exogenous to the 5′ non-coding region. In any of the embodiments herein, the non-coding region comprises a 3′ non-coding region, and the 3′ non-coding region comprises the endogenous or exogeneous nucleic acid. In some embodiments, the endogenous or exogenous nucleic acid is exogenous to the 3′ non-coding region.

### BRIEF DESCRIPTION OF THE FIGURES

[0042] Exemplary embodiments are illustrated in referenced figures. It is intended that the embodiments and figures disclosed herein are to be considered illustrative rather than restrictive.

[0043] FIG. 1 Schematic representation of a non-limiting example of an intron editing platform for an amiRNA described herein. An amiRNA is a natural miRNA that had its natural 22 natural nucleotides replaced by an artificially designed 22 nucleotides. A) Genomic region of a constitutive and/or tissue-specific, highly expressed gene is selected to receive an insertion of the endogenous or exogenous nucleic acid into an intronic region. B) The endogenous or exogenous nucleic acid is an amiRNA inserted via genome editing. C) After transcription, subsequent splicing and amiRNA processing, the mature native gene mRNA and the mature amiRNA are produced. D) The native protein encoded by the genome edited gene is not affected in the genetically edited cell. E) Schematic representation of the genomic region of a target gene. F) After the amiRNA processing, the mature amiRNA silence the mRNA of the target gene.

[0044] FIG. 2 Schematic representation of a non-limiting example of an intron editing platform for a nucleic acid sequence encoding a small peptide described herein. A) Genomic region of a constitutive and/or tissue-specific, highly expressed gene is selected to receive an insertion of the endogenous or exogenous nucleic acid into an intronic region. B) The endogenous or exogenous nucleic acid encoding a small peptide is inserted via genome editing. C) After transcription, subsequent splicing and processing, the mature native gene mRNA and the mature mRNA encoding the small peptide are produced. D) The native protein encoded by the edited gene in A, is not affected in the engineered cell. E) After translation the mature small peptide performs different activities in the cell such as hormonal regulation, activity against a pathogen, activity against an inset, activity against a nematode, nitrogen fixation, nutrient acquisition, immunity induction, biotic stress, or abiotic stress, or a combination thereof.

[0045] FIG. 3 Schematic representation of a map of an example of a donor plasmid comprised of components including an endogenous or exogenous nucleic acid sequence encoding an amiRNA. The target gene for intron or non-coding region editing of a gene, for example, may be one selected from Table 1. The donor plasmid is prepared to deliver the amiRNA. The exemplified amiRNA is the ath-MIR172b. The amiRNA exemplified is flanked by the guide sequence 29rev from Os03t0718100-01 intron 1 of Table 4, in both sites (5′ and 3′ ends). The two guide sequences and PAM motif enable donor DNA release from the plasmid and insertion on the intron1 of the Actin1 in the rice host plant.

[0046] FIG. 4 Schematic representation of a map of an example of a binary plasmid comprised of components for CRISPR-Cas9 genome editing. The CRISPR-Cas9 plasmid contains one guide sequence such as the guide sequence 29rev from Os03t0718100-01 intron 1 of the Table 1.

[0047] FIG. 5 Schematic representation of a non-limiting example of donor DNA components including endogenous or exogenous nucleic acid sequence. A) Blunt single-stranded oligodeoxynucleotide (ssODN) (SEQ ID NO: 1528; GAATTCCGGCTCTCTACCGTCT), B) Blunt linear double-stranded oligodeoxynucleotide (dsODN) (SEQ ID NO: 1528 (GAATTCCGGCTCTCTACCGTCT), SEQ ID NO: 1529; AGACGGTAGAGAGCCGGAATTC), C) Chemically modified dsODN (dsODN-CM) (SEQ ID NO: 1530, SEQ ID NO: 1531). D) The donor DNA delivered as a plasmid. E) Donor plasmid cleaved by nuclease at S1 sites, releasing the donor fragment of endogenous or exogenous nucleic acid.

[0048] FIG. 6 Schematic representation of a non-limiting example of a method for preparing an engineered cell. A) Plasmid comprising a DNA sequence encoding a nuclease and a guide RNA. B) Donor plasmid with two specific Cas9 nuclease cleavage sites flanking the donor DNA comprising an endogenous or exogenous nucleic acid. C) Blunt linear double-stranded oligodeoxynucleotide (dsODN). D) Chemically modified dsODN (dsODN-CM). E) Blunt single-stranded oligodeoxynucleotide (ssODN). F) Scheme of an example of a selected gene to receive a donor DNA into an intron region of the gene. G) Scheme of nuclease mediated insertion of endogenous or exogenous nucleic acid into an intronic region via non-homologous end-joining. After splicing, the native functions of the H) gene and I) protein are preserved, and the amiRNA or the small peptide are produced. J) The amiRNA precursor is processed into a mature amiRNA that silences a target mRNA for a desired trait. K) Intron comprising a small peptide coding region to deliver a desired trait.

[0049] FIG. 7 Schematic representation of an exemplary embodiment where an amiRNA inserted by a platform described herein silences a target reporter gene in host-plant cells. A) Plasmid comprising a construct to transiently express an amiRNA inserted into an intron of a gene selected from Table 1. B) Plasmid comprising a construct to express a reporter gene into plant cells. C) Plasmids from A) and B), are simultaneously Agroinfiltrated in Nicotiana benthamiana leaves. D) Transient co-expression from plasmids described in A) and B).

[0050] FIG. 8 Exemplary experiment of Nicotiana benthamiana leaves Agroinfected with an Agrobacterium strain harboring plasmids as for example the ones represented in FIG. 7A and FIG. 7B. A) The top right leaf quadrant shows the Agroinfection with a control reporter construct. The expression of the reporter gene was visually observed. The top left leaf quadrant shows the co-Agroinfection with both the control reporter construct and a construct comprising an amiRNA designed to silence the reporter gene (positive control). The expression of the reporter gene was, visually, completely abolished. The bottom left leaf quadrant shows the co-Agroinfection with both the control reporter construct and a construct comprising an amiRNA (osaACT amiRNA-Reporter, SEQ ID NO: 1532 (TGATCATCTGGTCGTTGGCGT) designed to silence the reporter gene inserted into the intron 2 of the rice ACTIN gene (SEQ ID NO: 278). The expression of the reporter gene was, visually, completely abolished. The bottom right leaf quadrant shows the co-Agroinfection with the control reporter construct and a construct comprising an amiRNA (gmaACT amiRNA-Reporter, SEQ ID NO: 1532) designed to silence the reporter gene inserted into the intron 2 of the soybean ACTIN gene (SEQ ID NO: 533). The expression of the reporter gene was, visually, completely abolished. B) The amiRNA designed to silence the reporter gene accumulated in the bottom left and bottom right leaf quadrants indicating that the amiRNA inserted into the intron 2 of the actin genes from rice and soybean was correctly processed. C) The mRNA transcribed from the reporter gene were targeted and degraded by the amiRNA inserted into the intron 2 of the actin genes from rice and soybean. D) After transcription, splicing, amiRNA processing a mature ACTIN mRNA was produced. After translation, the correct, native ACTIN protein was produced.

[0051] FIG. 9 Schematic representation of an exemplary embodiment for the expression of a small peptide from an intron of a gene. A) A nucleic acid sequence encoding a small peptide embedded into an intron of the rice ACTIN. B) After Agroinfiltration in Nicotiana benthamiana leaves, the gene is transcribed, the mRNA processed and translated producing the small peptide involved, for example, in the plant hormonal signaling pathway. C) Plasmids from A) are transiently expressed in Nicotiana benthamiana leaves.

[0052] FIG. 10 Schematic representation of an example embodiment where a genetically edited plant described herein has a desirable trait as compared to a non-engineered plant. A) Schematic representation of the genomic region of an endogenous gene. Grey boxes (exons). Lines (introns). B) Schematic representation of processed amiRNA-Reporter. C) Schematic representation of Reporter gene silencing by the amiRNA-Reporter.

### DETAILED DESCRIPTION

[0053] In one aspect, the present disclosure relates to compositions and methods for the development of biotechnological traits, for instance, traits that increase crop quality and yield by making plants resistant to pests and diseases, plants resistant to weed control chemicals, such as herbicides, plants able to acquire nutrients and water in a more efficient manner, plants with improved photosynthetic efficiency, and fruits and seeds with improved qualities. Currently some of these agronomic useful traits are produced by engineering transgenic plants overexpressing gene constructs harboring resistance genes driven by strong and constitutive promoters. For example, insecticidal proteins from Bacillus thuringiensis are placed under the transcriptional control of strong constitutive promoters such as the 35S promoter from cauliflower mosaic virus, the actin promoter from rice, and the ubiquitin promoter from maize, among others. Such gene constructs are used to produced insect resistant transgenic crops. Strong and constitutive promoters occur in all living organisms and constitute part of the housekeeping genes encoding proteins and nucleic acids essential for all living cells. Significant parts of those housekeeping genes comprise genes that are expressed at very high levels. Examples of highly expressed housekeeping genes in eukaryotic organisms are the ones encoding actin, ubiquitin, ribosomal genes, genes encoding heat shock proteins, among others. The present disclosure describes a platform that uses non-coding regions, e.g., introns, 5′non-coding region and 3′non-coding regions, of said housekeeping genes that have been edited to express regulatory nucleic acids or peptides that, when expressed in a plant cell results in one or more desirable traits, e.g., traits that increase crop quality and yield by making plants resistant to pests and diseases, plants resistant to weed control chemicals, such as herbicides, plants able to acquire nutrients and water in a more efficient manner, plants with improved photosynthetic efficiency, and fruits and seeds with improved qualities.

[0054] In another aspect, the present disclosure relates to compositions and methods for the development of biotechnological traits that require tissue/organ specific expression of regulatory nucleic acids and/or small peptides. For example, there are biotechnological traits that require the use of root specific promoters, from highly expressed genes. Such root specific, high expression driven promoters are used to engineer traits related to resistance to root diseases, for example nematodes, among others. Other biotechnological traits may require, leaf specific promoters, fruit specific promoters, seed specific promoters, among others. The present disclosure describes a platform that uses the non-coding regions, e.g., introns, 5′non-coding region, and/or 3′non-coding regions, of said tissue/organ specific expression genes that have been edited to express regulatory nucleic acids that when expressed in a plant results in traits, such as those that increase crop quality and yield by making plants resistant to pests and diseases, plants resistant to weed control chemicals, such as herbicides, plants able to acquire nutrients and water in a more efficient manner, plants with improved photosynthetic efficiency, and fruits and seeds with improved quality.

[0055] In certain aspects, provided herein are platforms based on the insertion of DNA sequences into non-coding regions, e.g., introns, 5′non-coding region, and/or 3′non-coding regions, of constitutive and/or tissue-specific, highly expressed genes so that the inserted sequences, when transcribed, give rise to regulatory RNAs or mRNAs that, upon translation, give rise to regulatory peptides. In some embodiments these regulatory elements, when expressed constitutively and/or in a tissue-specific manner, result in useful traits to enhance quality and crop productivity. The insertion of DNA sequences into non-coding regions, e.g., introns, 5′non-coding region and 3′non-coding regions can be achieved by precision gene editing based on non-homologous end joining or any other molecular method allowing insertion of DNA sequences into non-coding regions, e.g., introns, 5′non-coding region and 3′non-coding regions through non-homologous recombination. The present disclosure provides a platform to deliver regulatory RNA, such as miRNA, and RNA molecules encoding regulatory elements that can be used for traits development in eukaryotic organisms such as plants, animals, and fungi.

[0056] FIG. 1 shows a non-limiting example of a platform for amiRNA described herein. A) Scheme of genomic region of a host plant of the cell before splicing is shown. The natural allele (wild-type allele) of a constitutive and/or tissue-specific, highly expressed gene is designated to receive insertion of the endogenous or exogenous nucleic acid into a non-coding region exemplified as an intronic region. B) The endogenous or exogenous nucleic acid is an amiRNA inserted via genome editing using CRISPR-Cas9 technology and the endogenous DNA repair system non-homologous end joining. The insertion occurs in a single site of cleavage. C) After splicing, the post-splicing miRNA and the wild-type mature mRNA are present in the cell. D) The natural product of the genome edited gene in A is not affected in the engineered cell. E) Scheme of the genomic region of the target gene is shown. F) After the amiRNA processing, the mature amiRNA silences the target mRNA and the double stranded RNA are degraded by the cell machinery. The endogenous or exogenous nucleic acid may be exogenous to the cell. The endogenous or exogenous nucleic acid may be endogenous to the cell. The endogenous or exogenous nucleic acid may be exogenous to the non-coding region. The endogenous or exogenous nucleic acid may be endogenous to the non-coding region.

[0057] FIG. 2 shows a non-limiting example of a platform for small regulatory peptide described herein. A) Scheme of genomic region of a host plant of the cell before splicing is shown. The natural allele (wild-type allele) of a constitutive and/or tissue-specific, highly expressed gene is designated to receive an insertion of the endogenous or exogenous nucleic acid into a non-coding region exemplified as an intronic region. B) The endogenous or exogenous nucleic acid is a DNA encoding small peptide inserted via genome editing using CRISPR-Cas9 technology. The insertion is conducted by the endogenous DNA repair system non-homologous end joining. The insertion occurs in a single site of cleavage. C) After splicing, the post-splicing mature mRNA encoding a small peptide and the wild-type mature mRNA are present in the cell. D) The natural product of the genome edited gene in A, is not affected in the engineered cell. E) After processing (proteolyze and post-translational modifications), the mature small regulatory peptide regulates different processes in the cell. The endogenous or exogenous nucleic acid may be exogenous to the cell. The endogenous or exogenous nucleic acid may be endogenous to the cell. The endogenous or exogenous nucleic acid may be exogenous to the non-coding region. The endogenous or exogenous nucleic acid may be endogenous to the non-coding region.

### Cells

[0058] In one aspect, provided are cells comprising an endogenous or exogenous nucleic acid introduced into a non-coding region. In some examples, the non-coding region comprises an intron. In some examples, the non-coding region comprises a 5′ non-coding region (also referred to as a 5′ untranslated region or UTR). In some examples, the non-coding region comprises a 3′ non-coding region (also referred to as a 3′ UTR). Non-limiting components of such cells are described herein. The endogenous or exogenous nucleic acid may be exogenous to the cell. The endogenous or exogenous nucleic acid may be endogenous to the cell. The endogenous or exogenous nucleic acid may be exogenous to the non-coding region. The endogenous or exogenous nucleic acid may be endogenous to the non-coding region.

### Exons

[0059] Certain cells described herein comprise a first exon region and a second exon region. As used herein in certain embodiments, the first exon region and second exon region flank an intron that has been modified, and therefore the first exon region and second exon region are not limited to the first and second exons of a gene, and as shown in the examples herein, may represent the second and third exons of a gene, the third and fourth exons of a gene, and so on. In certain aspects, the first exon region and the second exon region are regions of a gene endogenous to the cell. Certain cells described herein comprise a 5′ non-coding region upstream of a gene endogenous to the cell. Certain cells described herein comprise a 3′ non-coding region downstream of a gene endogenous to the cell. In some embodiments, an exon region is adjacent to the 5′ non-coding region. In some embodiments, an exon region is adjacent to the 3′ non-coding region. In some embodiments, the gene endogenous to the cell is constitutively expressed. In one aspect, the gene endogenous to the cell is expressed in a specific tissue or organ. In some embodiments, the cell is a plant cell. Examples of the tissue or organ include, but not limited to, a root, stem, fruit, seed, leaf, ground tissue, vascular tissue, and dermal tissue.

[0060] In one aspect, the gene endogenous to the cell is highly expressed in the cell. In some embodiments, the expression of the gene endogenous to the cell corresponds to at least 1%, 2%, 3%, 4%, 5%, 6%, 7%, 8%, 9%, 10%, 11%, 12%, 13%, 14%, 15%, 16%, 17%, 18%, 19%, 20%, or more of the expression of all of the genes in the cell. In some embodiments, the expression of the gene endogenous to the cell is in the range of about 1-5%, 1-10%, 1-15%, 1-20%, 1-25%, 1-30%, 5-10%, 5-15%, 5-20%, 5-25%, 5-30%, 10-15%, 10-20%, 10-25%, 10-30%, 15-20%, 15-25%, 15-30%, 20-25%, 20-30%, 25-30% of the expression of all of the genes in the cell.

[0061] In one aspect, upon transcription and mRNA splicing, the native mRNA of the gene, e.g., a highly expressed gene, is translated into a native protein. In some embodiments, the gene encodes a native protein. Examples of the native protein include, but not limited to, actin, ubiquitin, ribosomal protein, heat shock protein, rubisco, tubulin, TMM, FAMA, rbc-S, CAB2, Rac, GLP, PDX1, BiGSSP, Lhca3, SMB, GATA23, ARF, SIREO, Prx, TIP2, ET304, TobRB7, and the proteins encoded by the genes described in Table 1.

TABLE 1
Examples of genes encoding native proteins. The first column (SEQ ID NO) contains the sequence identifier of non-limiting
examples of genes encoding native proteins (SEQ ID NOS: 1-263). The second column (ORGANISM) describes the binomial scientific
name (genus and species) of non-limiting examples of organisms: Orysa sativa, rice; Glicine max, soybean; Hordeum vulgare,
barley; Solanum lycopersicum, tomato; Solanum tuberosum, potato; Sorghum bicolor, sorghum; Triticum aestivum,
wheat; Zea mays, maize. The third column (ENSEMBL IDENTIFIER) contains the code identifier of the gene deposited in
EnsemblPlants database (https://plants.ensembl.org/index.html). The fourth column (NCBI GENE ID) contains each code to
the NCBI gene identifier. A person of skill in the art would be able to search the NCBI database with such value and
retrieve information of the gene, including expression information. The fifth column (FASTA SEQUENCE) contains the NCBI
Reference Sequence Identifier. The FASTA sequence is available in the corresponding sequence listing filed with the present
application. The sixth column (GENE NAME) describes the name of the correspondent sequence.

| SEQ | | | | FASTA | |
|---|---|---|---|---|---|
| ID NO | ORGANISM | Ensembl identifier | NCBI GENE ID | SEQUENCE | GENE NAME |
| 1 | Oryza sativa | Os03g0718100 | LOC4333919 | NC_029258.1 | actin 1 |
| 2 | Oryza sativa | Os05g0106600 | LOC4337566 | NC_029260.1 | actin 97 |
| 3 | Oryza sativa | Os11g0163100 | LOC4349863 | NC_029266.1 | actin-7 |
| 4 | Oryza sativa | Os03g0836000 | LOC4334702 | NC_029258.1 | actin-3 |
| 5 | Oryza sativa | Os01g0964133 | LOC9269066 | NC_029256.1 | actin-97 |
| 6 | Oryza sativa | Os10g0510000 | LOC4349087 | NC_029265.1 | actin-2 |
| 7 | Oryza sativa | Os12g0163700 | LOC4351585 | NC_029267.1 | actin 7 |
| 8 | Oryza sativa | Os05g0438800 | LOC4338914 | NC_029260.1 | actin 1 |
| 9 | Oryza sativa | Os01g0866100 | LOC4325068 | NC_029256.1 | actin-7 |
| 10 | Oryza sativa | Os03g0783000 | LOC9266759 | NC_029258.1 | actin-7 |
| 11 | Oryza sativa | Os08g0137200 | LOC4344621 | NC_029263.1 | actin-4 |
| 12 | Oryza sativa | Os02g0596900 | LOC4329867 | NC_029257.1 | actin-3 |
| 13 | Oryza sativa | Os08g0369300 | LOC4345402 | NC_029263.1 | actin-2 |
| 14 | Oryza sativa | Os01g0269900 | LOC4326270 | NC_029256.1 | actin-6 |
| 15 | Oryza sativa | Os04g0177600 | LOC4335089 | NC_029259.1 | actin-9 |
| 16 | Oryza sativa | Os01g0144340 | LOC107275681 | NC_029256.1 | actin-5 |
| 17 | Oryza sativa | Os04g0667700 | LOC4337330 | NC_029259.1 | actin-8 |
| 18 | Glycine max | GLYMA_04G215900 | LOC100789000 | NC_016091.4 | actin-7 |
| 19 | Glycine max | GLYMA_07G118800 | LOC100795390 | NC_038243.2 | actin-4 |
| 20 | Glycine max | GLYMA_02G091900 | LOC100781831 | NC_016089.4 | actin |
| 21 | Glycine max | GLYMA_18G290800 | LOC100792119 | NC_038254.2 | actin-6 |
| 22 | Glycine max | GLYMA_05G000900 | LOC100798523 | NM_001253024.2 | actin-like |
| 23 | Glycine max | GLYMA_19G000900 | LOC100799890 | NC_038255.2 | actin-97 |
| 24 | Glycine max | GLYMA_15G038700 | LOC100815472 | NC_038251.2 | actin |
| 25 | Glycine max | GLYMA_11G139800 | LOC100811630 | NC_038247.2 | actin |
| 26 | Glycine max | GLYMA_13G335600 | LOC100787265 | NC_038249.2 | actin |
| 27 | Glycine max | GLYMA_19G147900 | LOC100807341 | NC_038255.2 | actin |
| 28 | Glycine max | GLYMA_09G111200 | LOC100777705 | NC_038245.2 | actin |
| 29 | Glycine max | GLYMA_03G144800 | LOC100781142 | NC_016090.4 | actin-3 |
| 30 | Glycine max | GLYMA_02G172800 | LOC100813210 | NC_016089.4 | actin |
| 31 | Glycine max | GLYMA_04G215900 | LOC100789000 | NC_016091.4 | actin-7 |
| 32 | Glycine max | GLYMA_15G050200 | LOC100778206 | NC_038251.2 | actin-101 |
| 33 | Glycine max | GLYMA_08G182200 | LOC100797704 | NC_038244.2 | actin-101 |
| 34 | Glycine max | GLYMA_12G63400 | LOC100813437 | NC_038248.2 | actin |
| 35 | Glycine max | GLYMA_05G067600 | LOC106798766 | NC_038241.2 | actin-46 |
| 36 | Glycine max | GLYMA_19G095900 | LOC100803980 | NC_038255.2 | actin-2 |
| 37 | Glycine max | GLYMA_16G053400 | LOC100796648 | NC_038252.2 | actin-2 |
| 38 | Glycine max | GLYMA_15G275500 | LOC100794153 | NC_038251.2 | actin-7 |
| 39 | Glycine max | GLYMA_09G229000 | LOC100814978 | NC_038245.2 | actin-7 |
| 40 | Glycine max | GLYMA_12G007600 | LOC100813266 | NC_038248.2 | actin-7 |
| 41 | Glycine max | GLYMA_10G089200 | LOC100803056 | NC_038246.2 | actin-7 |
| 42 | Glycine max | GLYMA_03G107300 | LOC100785066 | NC_016090.4 | actin-4 |
| 43 | Glycine max | GLYMA_07G118800 | LOC100795390 | NC_038243.2 | actin-4 |
| 44 | Glycine max | GLYMA_08G040300 | LOC100819549 | NC_038244.2 | actin-4 |
| 45 | Glycine max | GLYMA_05G172200 | LOC100778870 | NC_038241.2 | actin-3 |
| 46 | Glycine max | GLYMA_05G172600 | LOC100780462 | NC_038241.2 | actin-3 |
| 47 | Glycine max | GLYMA_04G071500 | LOC100819827 | NC_016091.4 | actin-6 |
| 48 | Glycine max | GLYMA_05G232900 | LOC100778866 | NC_038241.2 | actin-4 |
| 49 | Glycine max | GLYMA_16G096700 | LOC100804254 | NC_038252.2 | actin-8 |
| 50 | Glycine max | GLYMA_06G248100 | LOC100809724 | NC_038242.2 | actin-4a |
| 51 | Glycine max | GLYMA_14G067800 | LOC100790295 | NC_038250.2 | actin-5 |
| 52 | Glycine max | GLYMA_04G112600 | LOC100791973 | NC_016091.4 | actin-8 |
| 53 | Glycine max | GLYMA_11G219700 | LOC100813421 | NC_038247.2 | actin-5 |
| 54 | Glycine max | GLYMA_18G037700 | LOC100808396 | NC_038254.2 | actin-5 |
| 55 | Glycine max | GLYMA_02G248700 | LOC100804305 | NC_016089.4 | actin-5 |
| 56 | Glycine max | GLYMA_20G202700 | LOC100788484 | NC_038256.2 | actin-9 |
| 57 | Glycine max | GLYMA_10G188100 | LOC100797938 | NC_038246.2 | actin-9 |
| 58 | Hordeum vulgare | HORVU.MOREX.r3.4HG0337850 | LOC123447531 | NC_058521.1 | actin-1 |
| 59 | Hordeum vulgare | HORVU.MOREX.r3.5HG0419480 | LOC123399877 | NC_058522.1 | actin-1-like |
| 60 | Hordeum vulgare | HORVU.MOREX.r3.5HG053200 | LOC123394939 | NC_058522.1 | actin-3 |
| 61 | Hordeum vulgare | HORVU.MOREX.r3.5HG0457850 | LOC123398932 | NC_058522.1 | actin-3-like |
| 62 | Hordeum vulgare | HORVU.MOREX.r3.1HG0003140 | LOC123430406 | NC_058518.1 | actin-97-like |
| 63 | Hordeum vulgare | HORVU.MOREX.r3.1HG0049980 | LOC123434401 | NC_058518.1 | actin-2 |
| 64 | Hordeum vulgare | HORVU.MOREX.r3.1HG0075220 | LOC123446308 | NC_058518.1 | actin-7 |
| 65 | Hordeum vulgare | HORVU.MOREX.r3.3HG0299830 | LOC123444811 | NC_058520.1 | actin-7-like |
| 66 | Hordeum vulgare | HORVU.MOREX.r3.4HG0336970 | LOC123447433 | NC_058521.1 | actin-related protein 2 |
| 67 | Hordeum vulgare | HORVU.MOREX.r3.5HG0515940 | LOC123452545 | NC_058522.1 | actin-related protein 7 |
| 68 | Hordeum vulgare | HORVU.MOREX.r3.5HG0504450 | LOC123451923 | NC_058522.1 | actin-related protein 7 |
| 69 | Hordeum vulgare | HORVU.MOREX.r3.6HG0572330 | LOC123401347 | NC_058523.1 | actin-related protein 4 |
| 70 | Hordeum vulgare | HORVU.MOREX.r3.6HG0591310 | LOC123402112 | NC_058523.1 | actin-related protein 3 |
| 71 | Hordeum vulgare | HORVU.MOREX.r3.7HG0703200 | LOC123409811 | NC_058524.1 | actin-related protein 3-like |
| 72 | Hordeum vulgare | HORVU.MOREX.r3.2HG0213240 | LOC123428445 | NC_058519.1 | actin-related protein 6 |
| 73 | Hordeum vulgare | HORVU.MOREX.r3.2HG0208800 | LOC123428295 | NC_058519.1 | actin-related protein 8 |
| 74 | Hordeum vulgare | HORVU.MOREX.r3.3HG0229480 | LOC123442658 | NC_058520.1 | actin-related protein 5 |
| 75 | Hordeum vulgare | HORVU.MOREX.r3.2HG0099270 | LOC123424374 | NC_058519.1 | Actin-related protein 9 |
| 76 | Solanum lycoperscium | Solyc10g086460.2 | LOC101255046 | NC_015447.3 | actin-75 |
| 77 | Solanum lycoperscium | Solyc04g011500.3 | LOC101260631 | NC_015441.3 | actin |
| 78 | Solanum lycoperscium | Solyc10g080500.2 | LOC101263261 | NC_015447.3 | actin |
| 79 | Solanum lycoperscium | Solyc03g078400.3 | LOC101264601 | NC_015440.3 | actin-7 |
| 80 | Solanum lycopersicum | Solyc11g065990.2 | LOC101253966 | NC_015448.3 | actin-97 |
| 81 | Solanum lycopersicum | Solyc06g076090.3 | LOC101249734 | NC_015443.3 | actin-82 |
| 82 | Solanum lycopersicum | Solyc00g017210.2 | LOC101253675 | NW_020442571.1 | actin-1 |
| 83 | Solanum lycopersicum | Solyc01g104775.1 | LOC101250165 | NC_015438.3 | actin |
| 84 | Solanum lycopersicum | Solyc10g086460.2 | LOC101255046 | NC_015447.3 | actin-75 |
| 85 | Solanum lycopersicum | Solyc04g071260.3 | LOC101264618 | NC_015441.3 | actin-105 |
| 86 | Solanum lycopersicum | Solyc09g010750.2 | LOC101255728 | NC_015446.3 | actin-71 |
| 87 | Solanum lycopersicum | Solyc11g005330.2 | LOC101262163 | NC_015448.3 | actin-7 |
| 88 | Solanum lycopersicum | Solyc12g037980.2 | LOC101260909 | NC_015449.3 | actin-4 |
| 89 | Solanum lycopersicum | Solyc04g024530.3 | LOC101252768 | NC_015441.3 | actin-3 |
| 90 | Solanum lycopersicum | Solyc05g013940.3 | LOC101250599 | NC_015442.3 | actin-3 |
| 91 | Solanum lycopersicum | Solyc05g018600.3 | LOC101245946 | NC_015442.3 | actin-6 |
| 92 | Solanum lycopersicum | Solyc07g066120.3 | LOC101264034 | NC_015444.3 | actin-8 |
| 93 | Solanum lycopersicum | Solyc06g043175.1 | LOC101260649 | NC_015443.3 | actin-5 |
| 94 | Solanum lycopersicum | Solyc09g089660.3 | LOC101244230 | NC_015446.3 | actin-9 |
| 95 | Solanum tuberosum | PGSC0003DMG400023708 | LOC102597225 | NW_006239057.1 | actin-66 |
| 96 | Solanum tuberosum | PGSC0003DMG400000439 | LOC102590523 | NW_006239029.1 | actin-65 |
| 97 | Solanum tuberosum | PGSC0003DMG400030319 | LOC102593904 | NW_006239053.1 | actin-82 |
| 98 | Solanum tuberosum | PGSC0003DMG400023708 | LOC102597225 | NW_006239057.1 | actin-66 |
| 99 | Solanum tuberosum | PGSC0003DMG400023429 | LOC102582178 | NW_006238999.1 | actin-58 |
| 100 | Solanum tuberosum | PGSC0003DMG400027746 | LOC102577777 | NW_006239491.1 | actin-97 |
| 101 | Solanum tuberosum | PGSC0003DMG400003985 | LOC102599168 | NW_006239054.1 | actin-7 |
| 102 | Solanum tuberosum | PGSC0003DMG400018449 | LOC102584969 | NW_006239115.1 | actin-7 |
| 103 | Solanum tuberosum | PGSC0003DMG400029745 | LOC102593148 | NW_006239061.1 | actin-101 |
| 104 | Solanum tuberosum | PGSC0003DMG400019204 | LOC102601944 | NW_006239032.1 | actin-75 |
| 105 | Solanum tuberosum | PGSC0003DMG400008912 | LOC102606253 | NW_006238947.1 | actin-71 |
| 106 | Solanum tuberosum | PGSC0003DMG400029746 | LOC102593148 | NW_006239061.1 | actin-101 |
| 107 | Solanum tuberosum | PGSC0003DMG400008619 | LOC102592284 | NW_006239231.1 | actin-104 |
| 108 | Solanum tuberosum | PGSC0003DMG400008618 | LOC102592628 | NW_006239231.1 | actin-100 |
| 109 | Solanum tuberosum | PGSC0003DMG400029120 | LOC102594941 | NW_006239231.1 | actin-100 |
| 110 | Solanum tuberosum | PGSC0003DMG400029121 | LOC102594616 | NW_006239231.1 | actin-104 |
| 111 | Solanum tuberosum | PGSC0003DMG400020244 | LOC102583119 | NW_006238930.1 | actin-2 |
| 112 | Solanum tuberosum | PGSC0003DMG402007428 | LOC102598577 | NW_006239290.1 | actin-7 |
| 113 | Solanum tuberosum | PGSC0003DMG400021766 | LOC102600647 | NW_006239317.1 | actin-4 |
| 114 | Solanum tuberosum | PGSC0003DMG400010772 | LOC102600427 | NW_006238953.1 | actin-3 |
| 115 | Solanum tuberosum | PGSC0003DMG400014966 | LOC102596585 | NW_006238929.1 | actin-6 |
| 116 | Solanum tuberosum | PGSC0003DMG400022148 | LOC102593881 | NW_006239000.1 | actin-8 |
| 117 | Solanum tuberosum | PGSC0003DMG400017256 | LOC102601622 | NW_006239103.1 | actin-9 |
| 118 | Sorghum bicolor | SORBI_3005G047100 | LOC8083089 | NC_012874.2 | actin-7 |
| 119 | Sorghum bicolor | SORBI_3001G197400 | LOC8065178 | NC_012870.2 | actin-2 |
| 120 | Sorghum bicolor | SORBI_3009G006100 | LOC8068648 | NC_012878.2 | actin-97 |
| 121 | Sorghum bicolor | SORBI_3008G047000 | LOC110429756 | NC_012877.2 | actin-7 |
| 122 | Sorghum bicolor | SORBI_3001G022800 | LOC8080194 | NC_012870.2 | actin-3 |
| 123 | Sorghum bicolor | SORBI_3003G367300 | LOC8062375 | NC_012872.2 | actin-7 |
| 124 | Sorghum bicolor | SORBI_3009G153000 | LOC8058524 | NC_012878.2 | actin-1 |
| 125 | Sorghum bicolor | SORBI_3009G005900 | LOC110430012 | NC_012878.2 | actin-97 |
| 126 | Sorghum bicolor | SORBI_3002G426300 | LOC8077510 | NC_012871.2 | actin-2 |
| 127 | Sorghum bicolor | SORBI_3001G234200 | LOC8059297 | NC_012870.2 | actin-7 |
| 128 | Sorghum bicolor | SORBI_3001G536000 | LOC8078015 | NC_012870.2 | actin-4 |
| 129 | Sorghum bicolor | SORBI_3004G203500 | LOC110434588 | NC_012873.2 | actin-3 |
| 130 | Sorghum bicolor | SORBI_3007G026800 | LOC8066138 | NC_012876.2 | actin-3 |
| 131 | Sorghum bicolor | SORBI_3008G173100 | LOC8071478 | NC_012877.2 | actin-6 |
| 132 | Sorghum bicolor | SORBI_3006G257800 | LOC8070289 | NC_012875.2 | actin-8 |
| 133 | Sorghum bicolor | SORBI_3003G074200 | LOC8073310 | NC_012872.2 | actin-5 |
| 134 | Sorghum bicolor | SORBI_3006G029100 | LOC8067782 | NC_012875.2 | actin-9 |
| 135 | Zea mays | Zm00001eb222460 | LOC100193210 | NC_050100.1 | arp7 - actin related protein |
| 136 | Zea mays | Zm00001eb366720 | LOC100281811 | NC_050103.1 | actin 2 |
| 137 | Zea mays | Zm00001eb246220 | LOC100281189 | NC_050100.1 | no description |
| 138 | Zea mays | Zm00001eb216070 | LOC103625937 | NC_050100.1 | actin-1 |
| 139 | Zea mays | Zm00001eb202400 | LOC100283878 | NC_050099.1 | no description |
| 140 | Zea mays | Zm00001eb086290 | LOC103646627 | NC_050097.1 | actin |
| 141 | Zea mays | Zm00001eb06540 | LOC103644169 | NC_050096.1 | no description |
| 142 | Zea mays | Zm00001eb267280 | LOC103629276 | NC_050101.1 | act97 |
| 143 | Zea mays | Zm00001eb092070 | LOC100304239 | NC_050097.1 | no description |
| 144 | Zea mays | Zm00001eb267260 | LOC103629275 | NC_050101.1 | act-97 |
| 145 | Zea mays | Zm00001eb220480 | LOC100280540 | NC_050100.1 | act-2 |
| 146 | Zea mays | Zm00001eb043800 | LOC100381643 | NC_050096.1 | actin |
| 147 | Zea mays | Zm00001eb063720 | LOC100273404 | NC_050096.1 | no description |
| 148 | Zea mays | Zm00001eb366720 | LOC100281811 | NC_050103.1 | actin 2 |
| 149 | Zea mays | Zm00001eb079680 | LOC103646315 | NC_050097.1 | actin |
| 150 | Zea mays | Zm00001eb146780 | LOC100273396 | NC_050098.1 | actin-7 |
| 151 | Zea mays | Zm00001eb242040 | LOC103628660 | NC_050100.1 | actin-7 |
| 152 | Zea mays | Zm00001eb356050 | LOC103635981 | NC_050103.1 | actin-97 |
| 153 | Zea mays | Zm00001eb055330 | LOC100284092 | NC_050096.1 | no description |
| 154 | Zea mays | Zm00001eb348450 | LOC100282267 | NC_050103.1 | actin-1 |
| 155 | Zea mays | Zm00001eb331340 | LOC103633595 | NC_050102.1 | actin-2 |
| 156 | Zea mays | Zm00001eb000800 | LOC100279759 | NC_050096.1 | no description |
| 157 | Zea mays | Zm00001eb183860 | LOC100384280 | NC_050099.1 | actin-3 |
| 158 | Zea mays | Zm00001eb261670 | LOC100281262 | NC_050101.1 | no description |
| 159 | Zea mays | Zm00001eb173290 | LOC100192466 | NC_050099.1 | no description |
| 160 | Zea mays | Zm00001eb411820 | LOC100284728 | NC_050105.1 | no description |
| 161 | Zea mays | Zm00001eb335830 | LOC100383901 | NC_050103.1 | no description |
| 162 | Glycine max | GLYMA_19G253300 | LOC100786327 | NC_038255.2 | tubulin gamma-2 chain |
| 163 | Glycine max | GLYMA_19G127700 | LOC100798849 | NC_038255.2 | tubulin beta-4 |
| 164 | Glycine max | GLYMA_16G154000 | LOC100780531 | NC_038252.2 | tubulin alpha-3 |
| 165 | Glycine max | GLYMA_11G044200 | LOC100785622 | NC_038247.2 | tubulin alpha-2 |
| 166 | Glycine max | GLYMA_19G113000 | LOC100796371 | NC_038255.2 | tubulin alpha-6 |
| 167 | Glycine max | GLYMA_03G124400 | LOC547844 | NC_016090.4 | beta-tubulin |
| 168 | Glycine max | GLYMA_17G258300 | LOC100819408 | NC_038253.2 | tubulin beta |
| 169 | Glycine max | GLYMA_10G235100 | LOC100788253 | NC_038246.2 | tubulin beta-1 |
| 170 | Glycine max | GLYMA_09G026100 | LOC100818878 | NC_038245.2 | tubulin beta |
| 171 | Glycine max | GLYMA_01G109300 | LOC100816898 | NC_016088.4 | tubulin beta-2 |
| 172 | Glycine max | GLYMA_10G255500 | LOC100799688 | NC_038246.2 | tubulin alpha |
| 173 | Glycine max | GLYMA_03G255800 | LOC100775439 | NC_016090.4 | tubulin gamma-1 |
| 174 | Glycine max | GLYMA_06G090500 | LOC100807401 | NC_038242.2 | tubulin alpha-1 |
| 175 | Glycine max | GLYMA_05G110200 | LOC100787058 | NC_038241.2 | tubulin alpha-3 |
| 176 | Glycine max | GLYMA_04G088500 | LOC100779027 | NC_016091.4 | tubulin alpha-1 |
| 177 | Glycine max | GLYMA_05G126100 | LOC100784236 | NC_038241.2 | tubulin beta |
| 178 | Glycine max | GLYMA_08G081100 | LOC100801608 | NC_038244.2 | tubulin beta |
| 179 | Glycine max | GLYMA_01G197500 | LOC100786598 | NC_016088.4 | tubulin alpha-2 |
| 180 | Glycine max | GLYMA_16G040100 | LOC100784487 | NC_038252.2 | tubulin alpha-3 |
| 181 | Glycine max | GLYMA_20G136000 | LOC100781185 | NC_038256.2 | tubulin alpha-4 |
| 182 | Glycine max | GLYMA_05G207500 | LOC100797652 | NC_038241.2 | tubulin beta-1 |
| 183 | Glycine max | GLYMA_04G023900 | LOC100781525 | NC_016091.4 | tubulin beta |
| 184 | Glycine max | GLYMA_20G159200 | LOC100793406 | NC_038256.2 | tubulin beta-1 |
| 185 | Oryza sativa | Os03g0726100 | LOC4333966 | NC_029258.1 | alpha-1 tubulin |
| 186 | Oryza sativa | Os03g0105600 | LOC4331315 | NC_029258.1 | tubulin beta-2 |
| 187 | Oryza sativa | Os02g0167300 | LOC4328420 | NC_029257.1 | tubulin beta-5 |
| 188 | Oryza sativa | Os05g0156600 | LOC4337861 | NC_029260.1 | tubulin gamma-2 |
| 189 | Oryza sativa | Os01g0282800 | LOC4326917 | NC_029256.1 | tubulin beta-1 |
| 190 | Oryza sativa | Os03g0219300 | LOC4332083 | NC_029258.1 | alpha-2 tubulin |
| 191 | Oryza sativa | Os07g0574800 | LOC4343694 | NC_029262.1 | tubulin alpha-1 |
| 192 | Oryza sativa | Os06g0671900 | LOC4341810 | NC_029261.1 | tubulin beta-3 |
| 193 | Oryza sativa | Os03g0780600 | LOC4334309 | NC_029258.1 | tubulin beta-7 |
| 194 | Oryza sativa | Os05g0413200 | LOC4338790 | NC_029260.1 | tubulin beta-6 |
| 195 | Oryza sativa | Os03g0661300 | LOC4333632 | NC_029258.1 | tubulin beta-8 |
| 196 | Oryza sativa | Os11g0247300 | LOC4350197 | NC_029266.1 | tubulin alpha-2 |
| 197 | Sorghum bicolor | SORBI_3003G328800 | LOC8082412 | NC_012872.2 | tubulin beta-4 chain |
| 198 | Sorghum bicolor | SORBI_3009G052100 | LOC8071186 | NC_012878.2 | tubulin gamma-2 chain |
| 199 | Sorghum bicolor | SORBI_3004G053300 | LOC8076107 | NC_012873.2 | tubulin beta chain |
| 200 | Sorghum bicolor | SORBI_3001G540900 | LOC8059525 | NC_012870.2 | tubulin beta-1 chain |
| 201 | Sorghum bicolor | SORBI_3001G073700 | LOC8083952 | NC_012870.2 | tubulin alpha-3 chain |
| 202 | Sorghum bicolor | SORBI_3001G453700 | LOC8056877 | NC_012870.2 | tubulin alpha-2 chain |
| 203 | Sorghum bicolor | SORBI_3001G146000 | LOC8057201 | NC_012870.2 | tubulin beta-3 chain |
| 204 | Sorghum bicolor | SORBI_3001G069800 | LOC8084157 | NC_012870.2 | tubulin beta-7 chain |
| 205 | Sorghum bicolor | SORBI_3010G224900 | LOC8061601 | NC_012879.2 | tubulin beta-7 chain |
| 206 | Solanum lycoperscium | Solyc06g035970.3 | LOC101265829 | NC_015443.3 | tubulin beta-1 chain |
| 207 | Solanum lycoperscium | Solyc04g077020.3 | LOC101244864 | NC_015441.3 | tubulin alpha chain |
| 208 | Solanum lycoperscium | Solyc03g111380.3 | LOC101260712 | NC_015440.3 | tubulin gamma chain |
| 209 | Solanum lycoperscium | Solyc03g025730.3 | LOC101251552 | NC_015440.3 | tubulin beta chain |
| 210 | Solanum lycoperscium | Solyc10g086760.2 | LOC101252240 | NC_015447.3 | tubulin beta-2 chain |
| 211 | Solanum lycoperscium | Solyc08g006890.3 | LOC101254013 | NC_015445.3 | tubulin alpha-3 chain |
| 212 | Solanum lycoperscium | Solyc04g081490.3 | LOC778227 | NC_015441.3 | tubulin beta chain |
| 213 | Solanum lycoperscium | Solyc02g091870.3 | LOC101248155 | NC_015439.3 | tubulin alpha chain |
| 214 | Solanum lycoperscium | Solyc02g087880.3 | LOC101255154 | NC_015439.3 | tubulin alpha chain |
| 215 | Solanum lycoperscium | Solyc03g118760.3 | LOC101246411 | NC_015440.3 | tubulin beta chain |
| 216 | Solanum lycoperscium | Solyc12g089310.2 | LOC101248956 | NC_015449.3 | tubulin beta chain |
| 217 | Solanum tuberosum | PGSC0003DMG400001320 | LOC102587420 | NW_006238930.1 | alpha-tubulin |
| 218 | Solanum tuberosum | PGSC0003DMG400029337 | LOC102588315 | NW_006238962.1 | beta-tubulin |
| 219 | Solanum tuberosum | PGSC0003DMG400030627 | LOC102583337 | NW_006239181.1 | tubulin alpha-3 chain |
| 220 | Solanum tuberosum | PGSC0003DMG400015180 | LOC102582533 | NW_006239058.1 | gamma tubulin |
| 221 | Solanum tuberosum | PGSC0003DMG400011088 | LOC102585315 | NW_006238934.1 | tubulin beta chain |
| 222 | Solanum tuberosum | PGSC0003DMG400009938 | LOC102577624 | NW_006238958.1 | beta-tubulin |
| 223 | Solanum tuberosum | PGSC0003DMG400030431 | LOC102581203 | NW_006239053.1 | beta-tubulin 2 |
| 224 | Solanum tuberosum | PGSC0003DMG400020850 | LOC102594814 | NW_006239201.1 | beta-tubulin 16 |
| 225 | Solanum tuberosum | PGSC0003DMG400028193 | LOC102586422 | NW_006238934.1 | tubulin beta-1 chain |
| 226 | Solanum tuberosum | PGSC0003DMG400014296 | LOC102594131 | NW_006239079.1 | tubulin beta-1 chain |
| 227 | Zea mays | Zm00001eb218000 | LOC542417 | NC_050100.1 | beta tubulin 4 |
| 228 | Zea mays | Zm00001eb232910 | LOC100383576 | NC_050100.1 | tubulin beta-4 |
| 229 | Zea mays | Zm00001eb369310 | LOC100382290 | NC_050103.1 | beta tubulin6 |
| 230 | Zea mays | Zm00001eb000490 | LOC100273658 | NC_050096.1 | beta tubulin1 |
| 231 | Zea mays | Zm00001eb282650 | LOC542424 | NC_050101.1 | gamma tubulin |
| 232 | Zea mays | Zm00001eb215710 | LOC100381303 | NC_050100.1 | tubulin alpha-3 |
| 233 | Zea mays | Zm00001eb345620 | LOC542436 | NC_050103.1 | gamma-tubulin |
| 234 | Glycine max | GLYMA_10G251900 | LOC100799042 | NC_038256.2 | polyubiquitin |
| 235 | Glycine max | GLYMA_03G197600 | LOC100306626 | NC_016090.4 | uncharacterized |
| 236 | Glycine max | GLYMA_08G168200 | LOC100800163 | NC_038244.2 | ubiquitin-NEDD8 |
| 237 | Glycine max | GLYMA_07G199900 | LOC100817214 | NC_038243.2 | polyubiquitin |
| 238 | Oryza sativa | Os06g0650100 | LOC4341684 | NC_029261.1 | ubiquitin-NEDD8 |
| 239 | Oryza sativa | Os09g0420800 | LOC4347085 | NC_029264.1 | ubiquitin-NEDD8 |
| 240 | Oryza sativa | Os03g0808400 | LOC107276907 | NC_029258.1 | uncharacterized |
| 241 | Oryza sativa | Os10g0475900 | LOC4348886 | NC_029265.1 | polyubiquitin 12 |
| 242 | Oryza sativa | Os09g0452700 | LOC4347232 | NC_029264.1 | ubiquitin |
| 243 | Oryza sativa | Os04g0628100 | LOC4337080 | NC_029259.1 | polyubiquitin 3 |
| 244 | Sorghum bicolor | SORBI_3002G178800 | LOC8054608 | NC_012871.2 | ubiquitin |
| 245 | Sorghum bicolor | SORBI_3002G204200 | LOC8062113 | NC_012871.2 | ubiquitin-NEDD8 |
| 246 | Sorghum bicolor | SORBI_3002G308900 | LOC8080708 | NC_012871.2 | ubiquitin |
| 247 | Sorghum bicolor | SORBI_3002G309000 | LOC8077466 | NC_012871.2 | ubiquitin |
| 248 | Sorghum bicolor | SORBI_3002G292500 | LOC8077238 | NC_012871.2 | ubiquitin |
| 249 | Sorghum bicolor | SORBI_3010G210000 | LOC8069343 | NC_012879.2 | ubiquitin-NEDD8 |
| 250 | Sorghum bicolor | SORBI_3001G444800 | LOC8085240 | NC_012870.2 | ubiquitin-60S |
| 251 | Sorghum bicolor | SORBI_3004G049900 | LOC8076096 | NC_012873.2 | polyubiquitin |
| 252 | Solanum lycoperscium | Solyc07g064130.2 | LOC101258282 | NC_015444.3 | polyubiquitin |
| 253 | Solanum lycoperscium | Solyc11g005670.2 | LOC101267758 | NC_015448.3 | ubiquitin |
| 254 | Solanum lycoperscium | Solyc03g078630.3 | LOC101261102 | NC_015440.3 | polyubiquitin |
| 255 | Solanum lycoperscium | Solyc10g006480.2 | LOC101256039 | NC_015447.3 | polyubiquitin |
| 256 | Solanum lycoperscium | Solyc12g098940.2 | LOC101248559 | NC_015449.3 | ubiquitin-40S |
| 257 | Solanum tuberosum | PGSC0003DMG400011242 | LOC102587939 | NW_0062390720.1 | ubiquitin-NEDD8 |
| 258 | Solanum tuberosum | PGSC0003DMG400005862 | LOC102580286 | NW_0062396730.1 | ubiquitin-60S |
| 259 | Solanum tuberosum | PGSC0003DMG400003984 | LOC102587932 | NW_0062390540.1 | polyubiquitin- |
| 260 | Zea mays | Zm00001eb275020 | LOC103629697 | NC_050101.1 | ubiquitin-NEDD8 |
| 261 | Zea mays | Zm00001eb095960 | LOC103647262 | NC_050097.1 | ubiquitin-60S |
| 262 | Zea mays | Zm00001eb009920 | LOC103633261 | NC_050096.1 | ubiquitin-60S |
| 263 | Zea mays | Zm00001eb009900 | LOC103633247 | NC_050096.1 | ubiquitin-60S |

### Non-Coding Regions

[0062] Provided herein, in certain embodiments, are cells comprising a non-coding region, wherein the non-coding region, such as an intron region or a 5′ non-coding region or a 3′ non-coding region, is modified (e.g., genetically edited) to comprise an endogenous or exogenous nucleic acid. As used herein, in some embodiments, a first modified non-coding or intron region refers to a non-coding, an intron, non-coding region, or intron region comprising an endogenous or exogenous nucleic acid. The endogenous or exogenous nucleic acid may be exogenous to the cell. The endogenous or exogenous nucleic acid may be exogenous to the non-coding region. The endogenous or exogenous nucleic acid may be endogenous to the cell. The endogenous or exogenous nucleic acid may be endogenous to the cell, and exogenous to the non-coding region. The endogenous or exogenous nucleic acid may be endogenous to the non-coding region. The first modified non-coding region may be present in any non-coding (e.g., intron) or non-coding (e.g., intron) region of a gene, e.g., the first modified intron region is present in the first, second, third, fourth, fifth, sixth, seventh, eighth, nineth, tenth, eleventh, twelfth, thirteenth, fourteenth, fifteenth, sixteenth, seventeenth, eighteenth, nineteenth, or twentieth intron of the gene, as applicable. For instance, in FIG. 10, the first modified intron region is present at intron 6 (between exon 6 and exon 7 of the gene). In some embodiments, the exogenous or endogenous nucleic acid is present in a 5′ non-coding region upstream of a gene. In some embodiments, the exogenous or endogenous nucleic acid is present in a 3′ non-coding region downstream of a gene. In some embodiments, the gene is selected from Table 1. In some embodiments, the intron is selected from Table 2. In some embodiments, the 5′ non-coding region or the 3′ non-coding region is a 5′ or 3′ non-coding region of a target gene from Table 1.

[0063] In some embodiments, the first modified non-coding region is modified from an intron of a gene. In some embodiments, the first modified non-coding region is modified from a 5′ non-coding region upstream of a gene. In some embodiments, the first modified non-coding region is modified from a 3′ noncoding region downstream of a gene. In some embodiments, the gene is endogenous to the cell. In some embodiments, the gene is selected from Table 1. In some embodiments, the gene comprises a plurality of introns. In some embodiments, the plurality of introns is about 2, 3, 4, 5, 6, 7, 8, 9, 10, 11, 12, 13, 14, 15, 16, 17, 18, 19, 20 introns (e.g., as exemplified by genes from Table 1). In some embodiments, the first modified intron region is present in the first, second, third, fourth, fifth, sixth, seventh, eighth, nineth, tenth, eleventh, twelfth, thirteenth, fourteenth, fifteenth, sixteenth, seventeenth, eighteenth, nineteenth, or twentieth intron of the gene, as applicable. In some embodiments, the gene is endogenous to the cell. In some embodiments, the gene is constitutively expressed. In some embodiments, the gene is expressed in a specific tissue or organ. In some embodiments, the cell is a plant cell, and the tissue or organ comprises a root, stem, fruit, seed, leaf, ground tissue, vascular tissue, or dermal tissue, or a combination of two or more thereof. In some embodiments, the gene is expressed at a range of 1-5%, 1-10%, 5-15%, or 5-20% of the total expressed genes in the cell (e.g., as determined by mRNA expression profiling of the said cell). In some embodiments, upon transcription and mRNA splicing, the native mRNA of the gene is translated into the native protein of the gene. In some embodiments, the gene encodes a native protein. A native protein may be a protein that has the same amino acid sequence as a protein endogenous to the cell. In some embodiments, the native protein is actin, ubiquitin, ribosomal protein, heat shock protein, rubisco, tubulin, TMM, FAMA, rbc-S, CAB2, Rac, GLP, PDX1, BiGSSP, Lhca3, SMB, GATA23, ARF, SIREO, Prx, TIP2, ET304, RB7, or any other protein expressed from a gene of Table 1.

[0064] In some embodiments, the endogenous or exogenous nucleic acid is inserted in the non-coding region without nucleobase replacement. In other embodiments, the endogenous or exogenous nucleic acid is inserted in the non-coding region with replacement of one or more nucleobases of an endogenous non-coding region of the cell. In some cases, the endogenous or exogenous nucleic acid replaces at least 1, 5, 10, 15, 20, 25, 30, 35, 40, 45, 50 or more nucleobases of an endogenous non-coding region of the cell. In some cases, the exogenous nucleic acid replaces about 1-10, 1-15, 1-20, 1-25, 1-30, 1-35, 1-40, 1-45, 1-50, 5-10, 5-15, 5-20, 5-25, 5-30, 5-35, 5-40, 5-45, 5-50, 10-15, 10-20, 10-25, 10-30, 10-35, 10-40, 10-45, 10-50, 15-20, 15-25, 15-30, 15-35, 15-40, 15-45, 15-50, 20-25, 20-30, 20-35, 20-40, 20-45, 20-50, 25-30, 25-35, 25-40, 25-45, 25-50, 30-35, 30-40, 30-45, 30-50, 35-40, 35-45, 35-50, 40-45, 40-50, 45-50 nucleobases of an endogenous non-coding region of the cell. In example embodiments, editing non-coding region such as an intron, 5′ non-coding region or 3′ non-coding region, does not cause a mutation and/or frame shift to the native protein.

[0065] In some embodiments, a non-coding region is selected for modification based on the presence of an efficient and specific gRNA, an adequate distance from a splicing region, or the expression level of the non-coding region, or any combination of two or more thereof. In some embodiments, the non-coding region is an intron, 5′ non-coding region, or 3′ non-coding region.

[0066] In one aspect, the first non-coding region comprises a first portion of the endogenous non-coding region of the cell, the endogenous or exogenous nucleic acid, and a second portion of the endogenous non-coding region of the cell. In some embodiments, the non-coding region is an intron, 5′ non-coding region, or 3′ non-coding region. Non-limiting examples of the endogenous introns are described in Table 2.

TABLE 2
Examples of endogenous introns. The first column (SEQ ID NO)
contains the sequence identifier of non-limiting examples of
endogenous introns (SEQ ID NOS: 264-1274). The second column
(ENSEMBL IDENTIFIER) contains the code identifier of the gene
deposited in the EnsemblPlants database. The third column (INTRON
NUMBER) describes which intron on the gene of the second column
is, and its position between adjacent exons. A person of skill
in the art would be able to search the EnsemblPlants database
with the values of the second column and retrieve the information
of the intron and the corresponding FASTA sequence. The FASTA
sequence is available in the corresponding sequence listing
filed with the present application.

| SEQ | | |
|---|---|---|
| ID NO | ENSEMBL ID | INTRON |
| 264 | Os01g0269900 | Intron 1 |
| 265 | Os01g0282800 | Intron 1 |
| 266 | Os01g0964133 | Intron 1 |
| 267 | Os02g0167300 | Intron 1 |
| 268 | Os02g0167300 | Intron 2 |
| 269 | Os02g0596900 | Intron 1 |
| 270 | Os03g0105600 | Intron 1 |
| 271 | Os03g0219300 | Intron 1 |
| 272 | Os03g0219300 | Intron 2 |
| 273 | Os03g0219300 | Intron 3 |
| 274 | Os03g0219300 | Intron 4 |
| 275 | Os03g0661300 | Intron 1 |
| 276 | Os03g0661300 | Intron 2 |
| 277 | Os03g0718100 | Intron 1 |
| 278 | Os03g0718100 | Intron 2 |
| 279 | Os03g0718100 | Intron 3 |
| 280 | Os03g0726100 | Intron 1 |
| 281 | Os03g0780600 | Intron 1 |
| 282 | Os03g0783000 | Intron 1 |
| 283 | Os03g0783000 | Intron 2 |
| 284 | Os03g0783000 | Intron 3 |
| 285 | Os03g0783000 | Intron 4 |
| 286 | Os03g0783000 | Intron 5 |
| 287 | Os03g0783000 | Intron 6 |
| 288 | Os03g0783000 | Intron 7 |
| 289 | Os03g0808400 | Intron 1 |
| 290 | Os03g0808400 | Intron 2 |
| 291 | Os03g0836000 | Intron 1 |
| 292 | Os03g0836000 | Intron 2 |
| 293 | Os03g0836000 | Intron 3 |
| 294 | Os03g0836000 | Intron 4 |
| 295 | Os04g0177600 | Intron 10 |
| 296 | Os04g0177600 | Intron 11 |
| 297 | Os04g0177600 | Intron 12 |
| 298 | Os04g0177600 | Intron 13 |
| 299 | Os04g0177600 | Intron 14 |
| 300 | Os04g0177600 | Intron 15 |
| 301 | Os04g0177600 | Intron 16 |
| 302 | Os04g0177600 | Intron 17 |
| 303 | Os04g0177600 | Intron 18 |
| 304 | Os04g0177600 | Intron 19 |
| 305 | Os04g0177600 | Intron 1 |
| 306 | Os04g0177600 | Intron 20 |
| 307 | Os04g0177600 | Intron 2 |
| 308 | Os04g0177600 | Intron 3 |
| 309 | Os04g0177600 | Intron 4 |
| 310 | Os04g0177600 | Intron 5 |
| 311 | Os04g0177600 | Intron 6 |
| 312 | Os04g0177600 | Intron 7 |
| 313 | Os04g0177600 | Intron 8 |
| 314 | Os04g0177600 | Intron 9 |
| 315 | Os05g0106600 | Intron 1 |
| 316 | Os05g0413200 | Intron 1 |
| 317 | Os05g0413200 | Intron 2 |
| 318 | Os05g0413200 | Intron 3 |
| 319 | Os05g0438800 | Intron 1 |
| 320 | Os05g0438800 | Intron 2 |
| 321 | Os05g0438800 | Intron 3 |
| 322 | Os05g0438800 | Intron 4 |
| 323 | Os06g0650100 | Intron 1 |
| 324 | Os06g0671900 | Intron 1 |
| 325 | Os07g0574800 | Intron 1 |
| 326 | Os07g0574800 | Intron 2 |
| 327 | Os07g0574800 | Intron 3 |
| 328 | Os07g0574800 | Intron 4 |
| 329 | Os08g0137200 | Intron 1 |
| 330 | Os08g0369300 | Intron 3 |
| 331 | Os09g0452700 | Intron 1 |
| 332 | Os09g0452700 | Intron 2 |
| 333 | Os09g0452700 | Intron 3 |
| 334 | Os10g0475900 | Intron 1 |
| 335 | Os10g0510000 | Intron 1 |
| 336 | Os11g0163100 | Intron 1 |
| 337 | Os11g0163100 | Intron 2 |
| 338 | Os11g0163100 | Intron 3 |
| 339 | Os11g0163100 | Intron 4 |
| 340 | Os11g0247300 | Intron 1 |
| 341 | Os11g0247300 | Intron 2 |
| 342 | Os11g0247300 | Intron 3 |
| 343 | Os12g0163700 | Intron 1 |
| 344 | Os03t0718100 | Intron 1 |
| 345 | Os03t0718100 | Intron 2 |
| 346 | GLYMA_01G109300 | Intron 1 |
| 347 | GLYMA_01G109300 | Intron 2 |
| 348 | GLYMA_01G197500 | Intron 1 |
| 349 | GLYMA_01G197500 | Intron 2 |
| 350 | GLYMA_01G197500 | Intron 3 |
| 351 | GLYMA_02G091900 | Intron 1 |
| 352 | GLYMA_02G091900 | Intron 2 |
| 353 | GLYMA_02G091900 | Intron 3 |
| 354 | GLYMA_02G172800 | Intron 1 |
| 355 | GLYMA_02G172800 | Intron 2 |
| 356 | GLYMA_02G172800 | Intron 3 |
| 357 | GLYMA_02G248700 | Intron 1 |
| 358 | GLYMA_02G248700 | Intron 2 |
| 359 | GLYMA_02G248700 | Intron 3 |
| 360 | GLYMA_02G248700 | Intron 4 |
| 361 | GLYMA_02G248700 | Intron 5 |
| 362 | GLYMA_02G248700 | Intron 6 |
| 363 | GLYMA_02G248700 | Intron 7 |
| 364 | GLYMA_02G248700 | Intron 8 |
| 365 | GLYMA_02G248700 | Intron 9 |
| 366 | GLYMA_02G248700 | Intron 10 |
| 367 | GLYMA_02G248700 | Intron 11 |
| 368 | GLYMA_03G107300 | Intron 10 |
| 369 | GLYMA_03G107300 | Intron 11 |
| 370 | GLYMA_03G107300 | Intron 12 |
| 371 | GLYMA_03G107300 | Intron 13 |
| 372 | GLYMA_03G107300 | Intron 14 |
| 373 | GLYMA_03G107300 | Intron 15 |
| 374 | GLYMA_03G107300 | Intron 16 |
| 375 | GLYMA_03G107300 | Intron 17 |
| 376 | GLYMA_03G107300 | Intron 18 |
| 377 | GLYMA_03G107300 | Intron 19 |
| 378 | GLYMA_03G107300 | Intron 1 |
| 379 | GLYMA_03G107300 | Intron 2 |
| 380 | GLYMA_03G107300 | Intron 3 |
| 381 | GLYMA_03G107300 | Intron 4 |
| 382 | GLYMA_03G107300 | Intron 5 |
| 383 | GLYMA_03G107300 | Intron 6 |
| 384 | GLYMA_03G107300 | Intron 7 |
| 385 | GLYMA_03G107300 | Intron 8 |
| 386 | GLYMA_03G107300 | Intron 9 |
| 387 | GLYMA_03G124400 | Intron 1 |
| 388 | GLYMA_03G144800 | Intron 1 |
| 389 | GLYMA_03G144800 | Intron 2 |
| 390 | GLYMA_03G144800 | Intron 3 |
| 391 | GLYMA_03G197600 | Intron 1 |
| 392 | GLYMA_03G197600 | Intron 2 |
| 393 | GLYMA_03G197600 | Intron 3 |
| 394 | GLYMA_03G255800 | Intron 1 |
| 395 | GLYMA_03G255800 | Intron 2 |
| 396 | GLYMA_03G255800 | Intron 3 |
| 397 | GLYMA_03G255800 | Intron 4 |
| 398 | GLYMA_03G255800 | Intron 5 |
| 399 | GLYMA_03G255800 | Intron 6 |
| 400 | GLYMA_03G255800 | Intron 7 |
| 401 | GLYMA_03G255800 | Intron 8 |
| 402 | GLYMA_03G255800 | Intron 9 |
| 403 | GLYMA_03G255800 | Intron 10 |
| 404 | GLYMA_04G023900 | Intron 1 |
| 405 | GLYMA_04G023900 | Intron 2 |
| 406 | GLYMA_04G071500 | Intron 1 |
| 407 | GLYMA_04G071500 | Intron 2 |
| 408 | GLYMA_04G071500 | Intron 3 |
| 409 | GLYMA_04G071500 | Intron 4 |
| 410 | GLYMA_04G071500 | Intron 5 |
| 411 | GLYMA_04G071500 | Intron 6 |
| 412 | GLYMA_04G088500 | Intron 1 |
| 413 | GLYMA_04G088500 | Intron 2 |
| 414 | GLYMA_04G112600 | Intron 1 |
| 415 | GLYMA_04G112600 | Intron 2 |
| 416 | GLYMA_04G112600 | Intron 3 |
| 417 | GLYMA_04G112600 | Intron 4 |
| 418 | GLYMA_04G112600 | Intron 5 |
| 419 | GLYMA_04G112600 | Intron 6 |
| 420 | GLYMA_04G112600 | Intron 7 |
| 421 | GLYMA_04G112600 | Intron 8 |
| 422 | GLYMA_04G112600 | Intron 9 |
| 423 | GLYMA_04G112600 | Intron 10 |
| 424 | GLYMA_04G215900 | Intron 1 |
| 425 | GLYMA_04G215900 | Intron 2 |
| 426 | GLYMA_04G215900 | Intron 3 |
| 427 | GLYMA_05G000900 | Intron 1 |
| 428 | GLYMA_05G000900 | Intron 2 |
| 429 | GLYMA_05G000900 | Intron 3 |
| 430 | GLYMA_05G110200 | Intron 1 |
| 431 | GLYMA_05G110200 | Intron 2 |
| 432 | GLYMA_05G110200 | Intron 3 |
| 433 | GLYMA_05G126100 | Intron 1 |
| 434 | GLYMA_05G126100 | Intron 2 |
| 435 | GLYMA_05G172600 | Intron 1 |
| 436 | GLYMA_05G172600 | Intron 2 |
| 437 | GLYMA_05G172600 | Intron 3 |
| 438 | GLYMA_05G172600 | Intron 4 |
| 439 | GLYMA_05G172600 | Intron 5 |
| 440 | GLYMA_05G172600 | Intron 6 |
| 441 | GLYMA_05G172600 | Intron 7 |
| 442 | GLYMA_05G172600 | Intron 8 |
| 443 | GLYMA_05G207500 | Intron 1 |
| 444 | GLYMA_05G207500 | Intron 2 |
| 445 | GLYMA_06G090500 | Intron 1 |
| 446 | GLYMA_06G090500 | Intron 2 |
| 447 | GLYMA_07G118800 | Intron 1 |
| 448 | GLYMA_07G118800 | Intron 2 |
| 449 | GLYMA_07G118800 | Intron 3 |
| 450 | GLYMA_07G118800 | Intron 4 |
| 451 | GLYMA_07G118800 | Intron 5 |
| 452 | GLYMA_07G118800 | Intron 6 |
| 453 | GLYMA_07G118800 | Intron 7 |
| 454 | GLYMA_07G118800 | Intron 8 |
| 455 | GLYMA_07G118800 | Intron 9 |
| 456 | GLYMA_07G118800 | Intron 10 |
| 457 | GLYMA_07G118800 | Intron 11 |
| 458 | GLYMA_07G118800 | Intron 12 |
| 459 | GLYMA_07G118800 | Intron 13 |
| 460 | GLYMA_07G118800 | Intron 14 |
| 461 | GLYMA_07G118800 | Intron 15 |
| 462 | GLYMA_07G118800 | Intron 16 |
| 463 | GLYMA_07G118800 | Intron 17 |
| 464 | GLYMA_07G118800 | Intron 18 |
| 465 | GLYMA_07G118800 | Intron 19 |
| 466 | GLYMA_08G040300 | Intron 1 |
| 467 | GLYMA_08G040300 | Intron 2 |
| 468 | GLYMA_08G040300 | Intron 3 |
| 469 | GLYMA_08G040300 | Intron 4 |
| 470 | GLYMA_08G040300 | Intron 5 |
| 471 | GLYMA_08G040300 | Intron 6 |
| 472 | GLYMA_08G040300 | Intron 7 |
| 473 | GLYMA_08G040300 | Intron 8 |
| 474 | GLYMA_08G040300 | Intron 9 |
| 475 | GLYMA_08G040300 | Intron 10 |
| 476 | GLYMA_08G040300 | Intron 11 |
| 477 | GLYMA_08G040300 | Intron 12 |
| 478 | GLYMA_08G040300 | Intron 13 |
| 479 | GLYMA_08G040300 | Intron 14 |
| 480 | GLYMA_08G040300 | Intron 15 |
| 481 | GLYMA_08G081100 | Intron 1 |
| 482 | GLYMA_08G081100 | Intron 2 |
| 483 | GLYMA_08G168200 | Intron 1 |
| 484 | GLYMA_08G168200 | Intron 2 |
| 485 | GLYMA_08G182200 | Intron 1 |
| 486 | GLYMA_08G182200 | Intron 2 |
| 487 | GLYMA_08G182200 | Intron 3 |
| 488 | GLYMA_09G026100 | Intron 1 |
| 489 | GLYMA_09G026100 | Intron 2 |
| 490 | GLYMA_09G111200 | Intron 1 |
| 491 | GLYMA_09G111200 | Intron 2 |
| 492 | GLYMA_09G111200 | Intron 3 |
| 493 | GLYMA_09G229000 | Intron 1 |
| 494 | GLYMA_09G229000 | Intron 2 |
| 495 | GLYMA_09G229000 | Intron 3 |
| 496 | GLYMA_09G229000 | Intron 4 |
| 497 | GLYMA_09G229000 | Intron 5 |
| 498 | GLYMA_09G229000 | Intron 6 |
| 499 | GLYMA_10G089200 | Intron 1 |
| 500 | GLYMA_10G089200 | Intron 2 |
| 501 | GLYMA_10G089200 | Intron 3 |
| 502 | GLYMA_10G089200 | Intron 4 |
| 503 | GLYMA_10G089200 | Intron 5 |
| 504 | GLYMA_10G089200 | Intron 6 |
| 505 | GLYMA_10G188100 | Intron 1 |
| 506 | GLYMA_10G188100 | Intron 2 |
| 507 | GLYMA_10G188100 | Intron 3 |
| 508 | GLYMA_10G188100 | Intron 4 |
| 509 | GLYMA_10G188100 | Intron 5 |
| 510 | GLYMA_10G188100 | Intron 6 |
| 511 | GLYMA_10G188100 | Intron 7 |
| 512 | GLYMA_10G188100 | Intron 8 |
| 513 | GLYMA_10G188100 | Intron 9 |
| 514 | GLYMA_10G188100 | Intron 10 |
| 515 | GLYMA_10G188100 | Intron 11 |
| 516 | GLYMA_10G188100 | Intron 12 |
| 517 | GLYMA_10G188100 | Intron 13 |
| 518 | GLYMA_10G188100 | Intron 14 |
| 519 | GLYMA_10G188100 | Intron 15 |
| 520 | GLYMA_10G188100 | Intron 16 |
| 521 | GLYMA_10G188100 | Intron 17 |
| 522 | GLYMA_10G188100 | Intron 18 |
| 523 | GLYMA_10G188100 | Intron 19 |
| 524 | GLYMA_10G235100 | Intron 1 |
| 525 | GLYMA_10G235100 | Intron 2 |
| 526 | GLYMA_10G255500 | Intron 1 |
| 527 | GLYMA_10G255500 | Intron 2 |
| 528 | GLYMA_10G255500 | Intron 3 |
| 529 | GLYMA_11G044200 | Intron 1 |
| 530 | GLYMA_11G044200 | Intron 2 |
| 531 | GLYMA_11G044200 | Intron 3 |
| 532 | GLYMA_11G139800 | Intron 1 |
| 533 | GLYMA_11G139800 | Intron 2 |
| 534 | GLYMA_11G139800 | Intron 3 |
| 535 | GLYMA_11G219700 | Intron 1 |
| 536 | GLYMA_11G219700 | Intron 2 |
| 537 | GLYMA_11G219700 | Intron 3 |
| 538 | GLYMA_11G219700 | Intron 4 |
| 539 | GLYMA_11G219700 | Intron 5 |
| 540 | GLYMA_11G219700 | Intron 6 |
| 541 | GLYMA_11G219700 | Intron 7 |
| 542 | GLYMA_11G219700 | Intron 8 |
| 543 | GLYMA_11G219700 | Intron 9 |
| 544 | GLYMA_11G219700 | Intron 10 |
| 545 | GLYMA_11G219700 | Intron 11 |
| 546 | GLYMA_12G007600 | Intron 1 |
| 547 | GLYMA_12G007600 | Intron 2 |
| 548 | GLYMA_12G007600 | Intron 3 |
| 549 | GLYMA_12G007600 | Intron 4 |
| 550 | GLYMA_12G007600 | Intron 5 |
| 551 | GLYMA_12G007600 | Intron 6 |
| 552 | GLYMA_12G063400 | Intron 1 |
| 553 | GLYMA_12G063400 | Intron 2 |
| 554 | GLYMA_12G063400 | Intron 3 |
| 555 | GLYMA_13G335600 | Intron 1 |
| 556 | GLYMA_13G335600 | Intron 2 |
| 557 | GLYMA_13G335600 | Intron 3 |
| 558 | GLYMA_14G067800 | Intron 1 |
| 559 | GLYMA_14G067800 | Intron 2 |
| 560 | GLYMA_14G067800 | Intron 3 |
| 561 | GLYMA_14G067800 | Intron 4 |
| 562 | GLYMA_14G067800 | Intron 5 |
| 563 | GLYMA_14G067800 | Intron 6 |
| 564 | GLYMA_14G067800 | Intron 7 |
| 565 | GLYMA_14G067800 | Intron 8 |
| 566 | GLYMA_15G038700 | Intron 1 |
| 567 | GLYMA_15G038700 | Intron 2 |
| 568 | GLYMA_15G038700 | Intron 3 |
| 569 | GLYMA_15G050200 | Intron 1 |
| 570 | GLYMA_15G050200 | Intron 2 |
| 571 | GLYMA_15G050200 | Intron 3 |
| 572 | GLYMA_16G053400 | Intron 1 |
| 573 | GLYMA_16G053400 | Intron 2 |
| 574 | GLYMA_16G053400 | Intron 3 |
| 575 | GLYMA_16G053400 | Intron 4 |
| 576 | GLYMA_16G053400 | Intron 5 |
| 577 | GLYMA_16G053400 | Intron 6 |
| 578 | GLYMA_16G053400 | Intron 7 |
| 579 | GLYMA_16G053400 | Intron 8 |
| 580 | GLYMA_16G053400 | Intron 9 |
| 581 | GLYMA_16G053400 | Intron 10 |
| 582 | GLYMA_16G053400 | Intron 11 |
| 583 | GLYMA_16G053400 | Intron 12 |
| 584 | GLYMA_16G053400 | Intron 13 |
| 585 | GLYMA_16G053400 | Intron 14 |
| 586 | GLYMA_16G096700 | Intron 1 |
| 587 | GLYMA_16G096700 | Intron 2 |
| 588 | GLYMA_16G096700 | Intron 3 |
| 589 | GLYMA_16G096700 | Intron 4 |
| 590 | GLYMA_16G096700 | Intron 5 |
| 591 | GLYMA_16G096700 | Intron 6 |
| 592 | GLYMA_16G096700 | Intron 7 |
| 593 | GLYMA_16G096700 | Intron 8 |
| 594 | GLYMA_16G096700 | Intron 9 |
| 595 | GLYMA_16G096700 | Intron 10 |
| 596 | GLYMA_16G096700 | Intron 11 |
| 597 | GLYMA_16G154000 | Intron 1 |
| 598 | GLYMA_16G154000 | Intron 2 |
| 599 | GLYMA_16G154000 | Intron 3 |
| 600 | GLYMA_16G154000 | Intron 4 |
| 601 | GLYMA_17G258300 | Intron 1 |
| 602 | GLYMA_17G258300 | Intron 2 |
| 603 | GLYMA_18G037700 | Intron 1 |
| 604 | GLYMA_18G037700 | Intron 2 |
| 605 | GLYMA_18G037700 | Intron 3 |
| 606 | GLYMA_18G037700 | Intron 4 |
| 607 | GLYMA_18G037700 | Intron 5 |
| 608 | GLYMA_18G037700 | Intron 6 |
| 609 | GLYMA_18G037700 | Intron 7 |
| 610 | GLYMA_18G037700 | Intron 8 |
| 611 | GLYMA_18G037700 | Intron 9 |
| 612 | GLYMA_18G037700 | Intron 10 |
| 613 | GLYMA_18G037700 | Intron 11 |
| 614 | GLYMA_18G290800 | Intron 1 |
| 615 | GLYMA_18G290800 | Intron 2 |
| 616 | GLYMA_18G290800 | Intron 3 |
| 617 | GLYMA_19G000900 | Intron 1 |
| 618 | GLYMA_19G000900 | Intron 2 |
| 619 | GLYMA_19G000900 | Intron 3 |
| 620 | GLYMA_19G095900 | Intron 1 |
| 621 | GLYMA_19G095900 | Intron 2 |
| 622 | GLYMA_19G095900 | Intron 3 |
| 623 | GLYMA_19G095900 | Intron 4 |
| 624 | GLYMA_19G095900 | Intron 5 |
| 625 | GLYMA_19G095900 | Intron 6 |
| 626 | GLYMA_19G095900 | Intron 7 |
| 627 | GLYMA_19G095900 | Intron 8 |
| 628 | GLYMA_19G095900 | Intron 9 |
| 629 | GLYMA_19G095900 | Intron 10 |
| 630 | GLYMA_19G095900 | Intron 11 |
| 631 | GLYMA_19G095900 | Intron 12 |
| 632 | GLYMA_19G095900 | Intron 13 |
| 633 | GLYMA_19G095900 | Intron 14 |
| 634 | GLYMA_19G113000 | Intron 1 |
| 635 | GLYMA_19G113000 | Intron 2 |
| 636 | GLYMA_19G113000 | Intron 3 |
| 637 | GLYMA_19G113000 | Intron 4 |
| 638 | GLYMA_19G127700 | Intron 1 |
| 639 | GLYMA_19G147900 | Intron 1 |
| 640 | GLYMA_19G147900 | Intron 2 |
| 641 | GLYMA_19G147900 | Intron 3 |
| 642 | GLYMA_19G253300 | Intron 1 |
| 643 | GLYMA_19G253300 | Intron 2 |
| 644 | GLYMA_19G253300 | Intron 3 |
| 645 | GLYMA_19G253300 | Intron 4 |
| 646 | GLYMA_19G253300 | Intron 5 |
| 647 | GLYMA_19G253300 | Intron 6 |
| 648 | GLYMA_19G253300 | Intron 7 |
| 649 | GLYMA_19G253300 | Intron 8 |
| 650 | GLYMA_19G253300 | Intron 9 |
| 651 | GLYMA_19G253300 | Intron 10 |
| 652 | GLYMA_20G136000 | Intron 1 |
| 653 | GLYMA_20G136000 | Intron 2 |
| 654 | GLYMA_20G136000 | Intron 3 |
| 655 | GLYMA_20G159200 | Intron 1 |
| 656 | GLYMA_20G159200 | Intron 2 |
| 657 | GLYMA_20G202700 | Intron 1 |
| 658 | GLYMA_20G202700 | Intron 2 |
| 659 | GLYMA_20G202700 | Intron 3 |
| 660 | GLYMA_20G202700 | Intron 4 |
| 661 | GLYMA_20G202700 | Intron 5 |
| 662 | GLYMA_20G202700 | Intron 6 |
| 663 | GLYMA_20G202700 | Intron 7 |
| 664 | GLYMA_20G202700 | Intron 8 |
| 665 | GLYMA_20G202700 | Intron 9 |
| 666 | GLYMA_20G202700 | Intron 10 |
| 667 | GLYMA_20G202700 | Intron 11 |
| 668 | GLYMA_20G202700 | Intron 12 |
| 669 | GLYMA_20G202700 | Intron 13 |
| 670 | GLYMA_20G202700 | Intron 14 |
| 671 | GLYMA_20G202700 | Intron 15 |
| 672 | GLYMA_20G202700 | Intron 16 |
| 673 | GLYMA_20G202700 | Intron 17 |
| 674 | GLYMA_20G202700 | Intron 18 |
| 675 | GLYMA_20G202700 | Intron 19 |
| 676 | GLYMA_02G091900 | Intron 2 |
| 677 | Solyc00g017210.2 | Intron 1 |
| 678 | Solyc00g017210.2 | Intron 2 |
| 679 | Solyc00g017210.2 | Intron 3 |
| 680 | Solyc02g087880.3 | Intron 1 |
| 681 | Solyc02g087880.3 | Intron 2 |
| 682 | Solyc02g087880.3 | Intron 3 |
| 683 | Solyc02g091870.3 | Intron 1 |
| 684 | Solyc02g091870.3 | Intron 2 |
| 685 | Solyc02g091870.3 | Intron 3 |
| 686 | Solyc03g025730.3 | Intron 1 |
| 687 | Solyc03g025730.3 | Intron 2 |
| 688 | Solyc03g078400.3 | Intron 1 |
| 689 | Solyc03g078400.3 | Intron 2 |
| 690 | Solyc03g078400.3 | Intron 3 |
| 691 | Solyc03g078400.3 | Intron 4 |
| 692 | Solyc03g078630.3 | Intron 1 |
| 693 | Solyc03g111380.3 | Intron 1 |
| 694 | Solyc03g111380.3 | Intron 2 |
| 695 | Solyc03g111380.3 | Intron 3 |
| 696 | Solyc03g111380.3 | Intron 4 |
| 697 | Solyc03g111380.3 | Intron 5 |
| 698 | Solyc03g111380.3 | Intron 6 |
| 699 | Solyc03g111380.3 | Intron 7 |
| 700 | Solyc03g111380.3 | Intron 8 |
| 701 | Solyc03g111380.3 | Intron 9 |
| 702 | Solyc03g111380.3 | Intron 10 |
| 703 | Solyc03g118760.3 | Intron 1 |
| 704 | Solyc03g118760.3 | Intron 2 |
| 705 | Solyc04g011500.3 | Intron 1 |
| 706 | Solyc04g011500.3 | Intron 2 |
| 707 | Solyc04g011500.3 | Intron 3 |
| 708 | Solyc04g011500.3 | Intron 4 |
| 709 | Solyc04g024530.3 | Intron 1 |
| 710 | Solyc04g024530.3 | Intron 2 |
| 711 | Solyc04g024530.3 | Intron 3 |
| 712 | Solyc04g024530.3 | Intron 4 |
| 713 | Solyc04g024530.3 | Intron 5 |
| 714 | Solyc04g024530.3 | Intron 6 |
| 715 | Solyc04g071260.3 | Intron 1 |
| 716 | Solyc04g071260.3 | Intron 2 |
| 717 | Solyc04g071260.3 | Intron 3 |
| 718 | Solyc04g077020.3 | Intron 1 |
| 719 | Solyc04g077020.3 | Intron 2 |
| 720 | Solyc04g077020.3 | Intron 3 |
| 721 | Solyc04g077020.3 | Intron 4 |
| 722 | Solyc04g081490.3 | Intron 1 |
| 723 | Solyc04g081490.3 | Intron 2 |
| 724 | Solyc05g013940.3 | Intron 1 |
| 725 | Solyc05g013940.3 | Intron 2 |
| 726 | Solyc05g013940.3 | Intron 3 |
| 727 | Solyc05g013940.3 | Intron 4 |
| 728 | Solyc05g013940.3 | Intron 5 |
| 729 | Solyc05g013940.3 | Intron 6 |
| 730 | Solyc05g013940.3 | Intron 7 |
| 731 | Solyc05g013940.3 | Intron 8 |
| 732 | Solyc05g018600.3 | Intron 1 |
| 733 | Solyc05g018600.3 | Intron 2 |
| 734 | Solyc05g018600.3 | Intron 3 |
| 735 | Solyc05g018600.3 | Intron 4 |
| 736 | Solyc05g018600.3 | Intron 5 |
| 737 | Solyc05g018600.3 | Intron 6 |
| 738 | Solyc06g043175.1 | Intron 1 |
| 739 | Solyc06g043175.1 | Intron 2 |
| 740 | Solyc06g043175.1 | Intron 3 |
| 741 | Solyc06g043175.1 | Intron 4 |
| 742 | Solyc06g043175.1 | Intron 5 |
| 743 | Solyc06g043175.1 | Intron 6 |
| 744 | Solyc06g043175.1 | Intron 7 |
| 745 | Solyc06g043175.1 | Intron 8 |
| 746 | Solyc06g043175.1 | Intron 9 |
| 747 | Solyc06g043175.1 | Intron 10 |
| 748 | Solyc06g043175.1 | Intron 11 |
| 749 | Solyc06g043175.1 | Intron 12 |
| 750 | Solyc06g043175.1 | Intron 13 |
| 751 | Solyc06g076090.3 | Intron 1 |
| 752 | Solyc06g076090.3 | Intron 2 |
| 753 | Solyc06g076090.3 | Intron 3 |
| 754 | Solyc06g076090.3 | Intron 4 |
| 755 | Solyc07g064130.2 | Intron 1 |
| 756 | Solyc07g066120.3 | Intron 1 |
| 757 | Solyc07g066120.3 | Intron 2 |
| 758 | Solyc07g066120.3 | Intron 3 |
| 759 | Solyc07g066120.3 | Intron 4 |
| 760 | Solyc07g066120.3 | Intron 5 |
| 761 | Solyc07g066120.3 | Intron 6 |
| 762 | Solyc07g066120.3 | Intron 7 |
| 763 | Solyc07g066120.3 | Intron 8 |
| 764 | Solyc07g066120.3 | Intron 9 |
| 765 | Solyc07g066120.3 | Intron 10 |
| 766 | Solyc07g066120.3 | Intron 11 |
| 767 | Solyc08g006890.3 | Intron 1 |
| 768 | Solyc08g006890.3 | Intron 2 |
| 769 | Solyc08g006890.3 | Intron 3 |
| 770 | Solyc09g089660.3 | Intron 1 |
| 771 | Solyc09g089660.3 | Intron 2 |
| 772 | Solyc09g089660.3 | Intron 3 |
| 773 | Solyc09g089660.3 | Intron 4 |
| 774 | Solyc09g089660.3 | Intron 5 |
| 775 | Solyc09g089660.3 | Intron 6 |
| 776 | Solyc09g089660.3 | Intron 7 |
| 777 | Solyc09g089660.3 | Intron 8 |
| 778 | Solyc09g089660.3 | Intron 9 |
| 779 | Solyc09g089660.3 | Intron 10 |
| 780 | Solyc09g089660.3 | Intron 11 |
| 781 | Solyc09g089660.3 | Intron 12 |
| 782 | Solyc09g089660.3 | Intron 13 |
| 783 | Solyc09g089660.3 | Intron 14 |
| 784 | Solyc09g089660.3 | Intron 15 |
| 785 | Solyc09g089660.3 | Intron 16 |
| 786 | Solyc09g089660.3 | Intron 17 |
| 787 | Solyc09g089660.3 | Intron 18 |
| 788 | Solyc09g089660.3 | Intron 19 |
| 789 | Solyc09g089660.3 | Intron 20 |
| 790 | Solyc10g006480.2 | Intron 1 |
| 791 | Solyc10g080500.2 | Intron 1 |
| 792 | Solyc10g080500.2 | Intron 2 |
| 793 | Solyc10g080500.2 | Intron 3 |
| 794 | Solyc10g080500.2 | Intron 4 |
| 795 | Solyc10g086460.2 | Intron 1 |
| 796 | Solyc10g086460.2 | Intron 2 |
| 797 | Solyc10g086460.2 | Intron 3 |
| 798 | Solyc10g086760.2 | Intron 1 |
| 799 | Solyc10g086760.2 | Intron 2 |
| 800 | Solyc11g005330.2 | Intron 1 |
| 801 | Solyc11g005330.2 | Intron 2 |
| 802 | Solyc11g005330.2 | Intron 3 |
| 803 | Solyc11g005330.2 | Intron 4 |
| 804 | Solyc11g005330.2 | Intron 5 |
| 805 | Solyc11g005670.2 | Intron 1 |
| 806 | Solyc11g005670.2 | Intron 2 |
| 807 | Solyc11g065990.2 | Intron 1 |
| 808 | Solyc11g065990.2 | Intron 2 |
| 809 | Solyc11g065990.2 | Intron 3 |
| 810 | Solyc12g037980.2 | Intron 1 |
| 811 | Solyc12g037980.2 | Intron 2 |
| 812 | Solyc12g037980.2 | Intron 3 |
| 813 | Solyc12g037980.2 | Intron 4 |
| 814 | Solyc12g037980.2 | Intron 5 |
| 815 | Solyc12g037980.2 | Intron 6 |
| 816 | Solyc12g037980.2 | Intron 7 |
| 817 | Solyc12g037980.2 | Intron 8 |
| 818 | Solyc12g037980.2 | Intron 9 |
| 819 | Solyc12g037980.2 | Intron 10 |
| 820 | Solyc12g037980.2 | Intron 11 |
| 821 | Solyc12g037980.2 | Intron 12 |
| 822 | Solyc12g037980.2 | Intron 13 |
| 823 | Solyc12g037980.2 | Intron 14 |
| 824 | Solyc12g037980.2 | Intron 15 |
| 825 | Solyc12g037980.2 | Intron 16 |
| 826 | Solyc12g037980.2 | Intron 17 |
| 827 | Solyc12g037980.2 | Intron 18 |
| 828 | Solyc12g037980.2 | Intron 19 |
| 829 | Solyc12g089310.2 | Intron 1 |
| 830 | Solyc12g089310.2 | Intron 2 |
| 831 | SORBI_3001G022800 | Intron 1 |
| 832 | SORBI_3001G022800 | Intron 2 |
| 833 | SORBI_3001G022800 | Intron 3 |
| 834 | SORBI_3001G069800 | Intron 1 |
| 835 | SORBI_3001G069800 | Intron 2 |
| 836 | SORBI_3001G073700 | Intron 1 |
| 837 | SORBI_3001G073700 | Intron 2 |
| 838 | SORBI_3001G073700 | Intron 3 |
| 839 | SORBI_3001G146000 | Intron 1 |
| 840 | SORBI_3001G146000 | Intron 2 |
| 841 | SORBI_3001G197400 | Intron 1 |
| 842 | SORBI_3001G197400 | Intron 2 |
| 843 | SORBI_3001G197400 | Intron 3 |
| 844 | SORBI_3001G234200 | Intron 1 |
| 845 | SORBI_3001G234200 | Intron 2 |
| 846 | SORBI_3001G234200 | Intron 3 |
| 847 | SORBI_3001G234200 | Intron 4 |
| 848 | SORBI_3001G234200 | Intron 5 |
| 849 | SORBI_3001G234200 | Intron 6 |
| 850 | SORBI_3001G444800 | Intron 1 |
| 851 | SORBI_3001G444800 | Intron 2 |
| 852 | SORBI_3001G444800 | Intron 3 |
| 853 | SORBI_3001G453700 | Intron 1 |
| 854 | SORBI_3001G453700 | Intron 2 |
| 855 | SORBI_3001G453700 | Intron 3 |
| 856 | SORBI_3001G453700 | Intron 4 |
| 857 | SORBI_3001G536000 | Intron 1 |
| 858 | SORBI_3001G536000 | Intron 2 |
| 859 | SORBI_3001G536000 | Intron 3 |
| 860 | SORBI_3001G536000 | Intron 4 |
| 861 | SORBI_3001G536000 | Intron 5 |
| 862 | SORBI_3001G536000 | Intron 6 |
| 863 | SORBI_3001G536000 | Intron 7 |
| 864 | SORBI_3001G536000 | Intron 8 |
| 865 | SORBI_3001G536000 | Intron 9 |
| 866 | SORBI_3001G536000 | Intron 10 |
| 867 | SORBI_3001G536000 | Intron 11 |
| 868 | SORBI_3001G536000 | Intron 12 |
| 869 | SORBI_3001G536000 | Intron 13 |
| 870 | SORBI_3001G536000 | Intron 14 |
| 871 | SORBI_3001G536000 | Intron 15 |
| 872 | SORBI_3001G536000 | Intron 16 |
| 873 | SORBI_3001G536000 | Intron 17 |
| 874 | SORBI_3001G536000 | Intron 18 |
| 875 | SORBI_3001G536000 | Intron 19 |
| 876 | SORBI_3001G540900 | Intron 1 |
| 877 | SORBI_3002G178800 | Intron 1 |
| 878 | SORBI_3002G204200 | Intron 1 |
| 879 | SORBI_3002G204200 | Intron 2 |
| 880 | SORBI_3002G292500 | Intron 1 |
| 881 | SORBI_3002G292500 | Intron 2 |
| 882 | SORBI_3002G308900 | Intron 1 |
| 883 | SORBI_3002G308900 | Intron 2 |
| 884 | SORBI_3002G308900 | Intron 3 |
| 885 | SORBI_3002G309000 | Intron 1 |
| 886 | SORBI_3002G309000 | Intron 2 |
| 887 | SORBI_3002G309000 | Intron 3 |
| 888 | SORBI_3002G426300 | Intron 1 |
| 889 | SORBI_3002G426300 | Intron 2 |
| 890 | SORBI_3002G426300 | Intron 3 |
| 891 | SORBI_3002G426300 | Intron 4 |
| 892 | SORBI_3002G426300 | Intron 5 |
| 893 | SORBI_3002G426300 | Intron 6 |
| 894 | SORBI_3002G426300 | Intron 7 |
| 895 | SORBI_3002G426300 | Intron 8 |
| 896 | SORBI_3002G426300 | Intron 9 |
| 897 | SORBI_3002G426300 | Intron 10 |
| 898 | SORBI_3002G426300 | Intron 11 |
| 899 | SORBI_3002G426300 | Intron 12 |
| 900 | SORBI_3002G426300 | Intron 13 |
| 901 | SORBI_3002G426300 | Intron 14 |
| 902 | SORBI_3003G074200 | Intron 1 |
| 903 | SORBI_3003G074200 | Intron 2 |
| 904 | SORBI_3003G074200 | Intron 3 |
| 905 | SORBI_3003G074200 | Intron 4 |
| 906 | SORBI_3003G074200 | Intron 5 |
| 907 | SORBI_3003G074200 | Intron 6 |
| 908 | SORBI_3003G074200 | Intron 7 |
| 909 | SORBI_3003G074200 | Intron 8 |
| 910 | SORBI_3003G074200 | Intron 9 |
| 911 | SORBI_3003G074200 | Intron 10 |
| 912 | SORBI_3003G074200 | Intron 11 |
| 913 | SORBI_3003G328800 | Intron 1 |
| 914 | SORBI_3003G328800 | Intron 2 |
| 915 | SORBI_3003G367300 | Intron 1 |
| 916 | SORBI_3003G367300 | Intron 2 |
| 917 | SORBI_3003G367300 | Intron 3 |
| 918 | SORBI_3004G053300 | Intron 1 |
| 919 | SORBI_3004G053300 | Intron 2 |
| 920 | SORBI_3004G203500 | Intron 1 |
| 921 | SORBI_3004G203500 | Intron 2 |
| 922 | SORBI_3004G203500 | Intron 3 |
| 923 | SORBI_3004G203500 | Intron 4 |
| 924 | SORBI_3004G203500 | Intron 5 |
| 925 | SORBI_3004G203500 | Intron 6 |
| 926 | SORBI_3004G203500 | Intron 7 |
| 927 | SORBI_3004G203500 | Intron 8 |
| 928 | SORBI_3004G203500 | Intron 9 |
| 929 | SORBI_3005G047100 | Intron 1 |
| 930 | SORBI_3005G047100 | Intron 2 |
| 931 | SORBI_3005G047100 | Intron 3 |
| 932 | SORBI_3006G029100 | Intron 1 |
| 933 | SORBI_3006G029100 | Intron 2 |
| 934 | SORBI_3006G029100 | Intron 3 |
| 935 | SORBI_3006G029100 | Intron 4 |
| 936 | SORBI_3006G029100 | Intron 5 |
| 937 | SORBI_3006G029100 | Intron 6 |
| 938 | SORBI_3006G029100 | Intron 7 |
| 939 | SORBI_3006G029100 | Intron 8 |
| 940 | SORBI_3006G029100 | Intron 9 |
| 941 | SORBI_3006G029100 | Intron 10 |
| 942 | SORBI_3006G029100 | Intron 11 |
| 943 | SORBI_3006G029100 | Intron 12 |
| 944 | SORBI_3006G029100 | Intron 13 |
| 945 | SORBI_3006G029100 | Intron 14 |
| 946 | SORBI_3006G029100 | Intron 15 |
| 947 | SORBI_3006G029100 | Intron 16 |
| 948 | SORBI_3006G029100 | Intron 17 |
| 949 | SORBI_3006G029100 | Intron 18 |
| 950 | SORBI_3006G029100 | Intron 19 |
| 951 | SORBI_3006G257800 | Intron 1 |
| 952 | SORBI_3006G257800 | Intron 2 |
| 953 | SORBI_3006G257800 | Intron 3 |
| 954 | SORBI_3006G257800 | Intron 4 |
| 955 | SORBI_3006G257800 | Intron 5 |
| 956 | SORBI_3006G257800 | Intron 6 |
| 957 | SORBI_3006G257800 | Intron 7 |
| 958 | SORBI_3006G257800 | Intron 8 |
| 959 | SORBI_3006G257800 | Intron 9 |
| 960 | SORBI_3006G257800 | Intron 10 |
| 961 | SORBI_3006G257800 | Intron 11 |
| 962 | SORBI_3007G026800 | Intron 1 |
| 963 | SORBI_3007G026800 | Intron 2 |
| 964 | SORBI_3007G026800 | Intron 3 |
| 965 | SORBI_3007G026800 | Intron 4 |
| 966 | SORBI_3007G026800 | Intron 5 |
| 967 | SORBI_3007G026800 | Intron 6 |
| 968 | SORBI_3007G026800 | Intron 7 |
| 969 | SORBI_3007G026800 | Intron 8 |
| 970 | SORBI_3007G026800 | Intron 9 |
| 971 | SORBI_3008G047000 | Intron 1 |
| 972 | SORBI_3008G047000 | Intron 2 |
| 973 | SORBI_3008G047000 | Intron 3 |
| 974 | SORBI_3008G173100 | Intron 1 |
| 975 | SORBI_3008G173100 | Intron 2 |
| 976 | SORBI_3008G173100 | Intron 3 |
| 977 | SORBI_3008G173100 | Intron 4 |
| 978 | SORBI_3008G173100 | Intron 5 |
| 979 | SORBI_3008G173100 | Intron 6 |
| 980 | SORBI_3009G005900 | Intron 1 |
| 981 | SORBI_3009G005900 | Intron 2 |
| 982 | SORBI_3009G005900 | Intron 3 |
| 983 | SORBI_3009G052100 | Intron 1 |
| 984 | SORBI_3009G052100 | Intron 2 |
| 985 | SORBI_3009G052100 | Intron 3 |
| 986 | SORBI_3009G052100 | Intron 4 |
| 987 | SORBI_3009G052100 | Intron 5 |
| 988 | SORBI_3009G052100 | Intron 6 |
| 989 | SORBI_3009G052100 | Intron 7 |
| 990 | SORBI_3009G052100 | Intron 8 |
| 991 | SORBI_3009G052100 | Intron 9 |
| 992 | SORBI_3009G052100 | Intron 10 |
| 993 | SORBI_3009G153000 | Intron 1 |
| 994 | SORBI_3009G153000 | Intron 2 |
| 995 | SORBI_3009G153000 | Intron 3 |
| 996 | SORBI_3010G210000 | Intron 1 |
| 997 | SORBI_3010G210000 | Intron 2 |
| 998 | SORBI_3010G224900 | Intron 1 |
| 999 | SORBI_3010G224900 | Intron 2 |
| 1000 | SORBI_3005G047100 | Intron 2 |
| 1001 | SORBI_3005G047100 | Intron 3 |
| 1002 | PGSC0003DMG400001320 | Intron 1 |
| 1003 | PGSC0003DMG400001320 | Intron 2 |
| 1004 | PGSC0003DMG400001320 | Intron 3 |
| 1005 | PGSC0003DMG400005862 | Intron 1 |
| 1006 | PGSC0003DMG400005862 | Intron 2 |
| 1007 | PGSC0003DMG400005862 | Intron 3 |
| 1008 | PGSC0003DMG400008618 | Intron 1 |
| 1009 | PGSC0003DMG400008618 | Intron 2 |
| 1010 | PGSC0003DMG400008619 | Intron 1 |
| 1011 | PGSC0003DMG400008619 | Intron 2 |
| 1012 | PGSC0003DMG400008912 | Intron 1 |
| 1013 | PGSC0003DMG400008912 | Intron 2 |
| 1014 | PGSC0003DMG400008912 | Intron 3 |
| 1015 | PGSC0003DMG400008912 | Intron 4 |
| 1016 | PGSC0003DMG400009938 | Intron 1 |
| 1017 | PGSC0003DMG400009938 | Intron 2 |
| 1018 | PGSC0003DMG400010772 | Intron 1 |
| 1019 | PGSC0003DMG400010772 | Intron 2 |
| 1020 | PGSC0003DMG400010772 | Intron 3 |
| 1021 | PGSC0003DMG400010772 | Intron 4 |
| 1022 | PGSC0003DMG400010772 | Intron 5 |
| 1023 | PGSC0003DMG400010772 | Intron 6 |
| 1024 | PGSC0003DMG400010772 | Intron 7 |
| 1025 | PGSC0003DMG400010772 | Intron 8 |
| 1026 | PGSC0003DMG400011088 | Intron 1 |
| 1027 | PGSC0003DMG400011088 | Intron 2 |
| 1028 | PGSC0003DMG400011242 | Intron 1 |
| 1029 | PGSC0003DMG400011242 | Intron 2 |
| 1030 | PGSC0003DMG400014296 | Intron 1 |
| 1031 | PGSC0003DMG400014296 | Intron 2 |
| 1032 | PGSC0003DMG400014966 | Intron 1 |
| 1033 | PGSC0003DMG400014966 | Intron 2 |
| 1034 | PGSC0003DMG400014966 | Intron 3 |
| 1035 | PGSC0003DMG400014966 | Intron 4 |
| 1036 | PGSC0003DMG400014966 | Intron 5 |
| 1037 | PGSC0003DMG400014966 | Intron 6 |
| 1038 | PGSC0003DMG400015180 | Intron 1 |
| 1039 | PGSC0003DMG400015180 | Intron 2 |
| 1040 | PGSC0003DMG400015180 | Intron 3 |
| 1041 | PGSC0003DMG400015180 | Intron 4 |
| 1042 | PGSC0003DMG400015180 | Intron 5 |
| 1043 | PGSC0003DMG400015180 | Intron 6 |
| 1044 | PGSC0003DMG400015180 | Intron 7 |
| 1045 | PGSC0003DMG400015180 | Intron 8 |
| 1046 | PGSC0003DMG400015180 | Intron 9 |
| 1047 | PGSC0003DMG400015180 | Intron 10 |
| 1048 | PGSC0003DMG400018449 | Intron 1 |
| 1049 | PGSC0003DMG400018449 | Intron 2 |
| 1050 | PGSC0003DMG400018449 | Intron 3 |
| 1051 | PGSC0003DMG400018449 | Intron 4 |
| 1052 | PGSC0003DMG400019204 | Intron 1 |
| 1053 | PGSC0003DMG400019204 | Intron 2 |
| 1054 | PGSC0003DMG400019204 | Intron 3 |
| 1055 | PGSC0003DMG400019204 | Intron 4 |
| 1056 | PGSC0003DMG400020244 | Intron 1 |
| 1057 | PGSC0003DMG400020244 | Intron 2 |
| 1058 | PGSC0003DMG400020244 | Intron 3 |
| 1059 | PGSC0003DMG400020244 | Intron 4 |
| 1060 | PGSC0003DMG400020244 | Intron 5 |
| 1061 | PGSC0003DMG400020244 | Intron 6 |
| 1062 | PGSC0003DMG400020244 | Intron 7 |
| 1063 | PGSC0003DMG400020244 | Intron 8 |
| 1064 | PGSC0003DMG400020244 | Intron 9 |
| 1065 | PGSC0003DMG400020244 | Intron 10 |
| 1066 | PGSC0003DMG400020244 | Intron 11 |
| 1067 | PGSC0003DMG400020244 | Intron 12 |
| 1068 | PGSC0003DMG400020244 | Intron 13 |
| 1069 | PGSC0003DMG400020850 | Intron 1 |
| 1070 | PGSC0003DMG400020850 | Intron 2 |
| 1071 | PGSC0003DMG400022148 | Intron 1 |
| 1072 | PGSC0003DMG400022148 | Intron 2 |
| 1073 | PGSC0003DMG400022148 | Intron 3 |
| 1074 | PGSC0003DMG400022148 | Intron 4 |
| 1075 | PGSC0003DMG400022148 | Intron 5 |
| 1076 | PGSC0003DMG400022148 | Intron 6 |
| 1077 | PGSC0003DMG400022148 | Intron 7 |
| 1078 | PGSC0003DMG400022148 | Intron 8 |
| 1079 | PGSC0003DMG400022148 | Intron 9 |
| 1080 | PGSC0003DMG400022148 | Intron 10 |
| 1081 | PGSC0003DMG400022148 | Intron 11 |
| 1082 | PGSC0003DMG400023429 | Intron 1 |
| 1083 | PGSC0003DMG400023429 | Intron 2 |
| 1084 | PGSC0003DMG400023429 | Intron 3 |
| 1085 | PGSC0003DMG400023429 | Intron 4 |
| 1086 | PGSC0003DMG400023708 | Intron 1 |
| 1087 | PGSC0003DMG400023708 | Intron 2 |
| 1088 | PGSC0003DMG400023708 | Intron 3 |
| 1089 | PGSC0003DMG400023708 | Intron 4 |
| 1090 | PGSC0003DMG400027746 | Intron 1 |
| 1091 | PGSC0003DMG400027746 | Intron 2 |
| 1092 | PGSC0003DMG400027746 | Intron 3 |
| 1093 | PGSC0003DMG400027746 | Intron 4 |
| 1094 | PGSC0003DMG400028193 | Intron 1 |
| 1095 | PGSC0003DMG400028193 | Intron 2 |
| 1096 | PGSC0003DMG400028193 | Intron 3 |
| 1097 | PGSC0003DMG400029120 | Intron 1 |
| 1098 | PGSC0003DMG400029120 | Intron 2 |
| 1099 | PGSC0003DMG400029746 | Intron 1 |
| 1100 | PGSC0003DMG400030319 | Intron 1 |
| 1101 | PGSC0003DMG400030319 | Intron 2 |
| 1102 | PGSC0003DMG400030319 | Intron 3 |
| 1103 | PGSC0003DMG400030319 | Intron 4 |
| 1104 | PGSC0003DMG400030431 | Intron 1 |
| 1105 | PGSC0003DMG400030431 | Intron 2 |
| 1106 | PGSC0003DMG400030627 | Intron 1 |
| 1107 | PGSC0003DMG400030627 | Intron 2 |
| 1108 | PGSC0003DMG400030627 | Intron 3 |
| 1109 | PGSC0003DMG402007428 | Intron 1 |
| 1110 | PGSC0003DMG402007428 | Intron 2 |
| 1111 | PGSC0003DMG402007428 | Intron 3 |
| 1112 | PGSC0003DMG402007428 | Intron 4 |
| 1113 | PGSC0003DMG402007428 | Intron 5 |
| 1114 | PGSC0003DMG402007428 | Intron 6 |
| 1115 | Zm00001eb000490 | Intron 1 |
| 1116 | Zm00001eb000800 | Intron 1 |
| 1117 | Zm00001eb000800 | Intron 2 |
| 1118 | Zm00001eb000800 | Intron 3 |
| 1119 | Zm00001eb000800 | Intron 4 |
| 1120 | Zm00001eb000800 | Intron 5 |
| 1121 | Zm00001eb000800 | Intron 6 |
| 1122 | Zm00001eb000800 | Intron 7 |
| 1123 | Zm00001eb000800 | Intron 8 |
| 1124 | Zm00001eb000800 | Intron 9 |
| 1125 | Zm00001eb000800 | Intron 10 |
| 1126 | Zm00001eb000800 | Intron 11 |
| 1127 | Zm00001eb000800 | Intron 12 |
| 1128 | Zm00001eb000800 | Intron 13 |
| 1129 | Zm00001eb000800 | Intron 14 |
| 1130 | Zm00001eb000800 | Intron 15 |
| 1131 | Zm00001eb000800 | Intron 16 |
| 1132 | Zm00001eb000800 | Intron 17 |
| 1133 | Zm00001eb000800 | Intron 18 |
| 1134 | Zm00001eb000800 | Intron 19 |
| 1135 | Zm00001eb009900 | Intron 1 |
| 1136 | Zm00001eb009900 | Intron 2 |
| 1137 | Zm00001eb009900 | Intron 3 |
| 1138 | Zm00001eb009900 | Intron 4 |
| 1139 | Zm00001eb009920 | Intron 1 |
| 1140 | Zm00001eb009920 | Intron 2 |
| 1141 | Zm00001eb009920 | Intron 3 |
| 1142 | Zm00001eb043800 | Intron 1 |
| 1143 | Zm00001eb043800 | Intron 2 |
| 1144 | Zm00001eb043800 | Intron 3 |
| 1145 | Zm00001eb043800 | Intron 4 |
| 1146 | Zm00001eb055330 | Intron 1 |
| 1147 | Zm00001eb055330 | Intron 2 |
| 1148 | Zm00001eb055330 | Intron 3 |
| 1149 | Zm00001eb063720 | Intron 1 |
| 1150 | Zm00001eb063720 | Intron 2 |
| 1151 | Zm00001eb063720 | Intron 3 |
| 1152 | Zm00001eb063720 | Intron 4 |
| 1153 | Zm00001eb079680 | Intron 1 |
| 1154 | Zm00001eb079680 | Intron 2 |
| 1155 | Zm00001eb079680 | Intron 3 |
| 1156 | Zm00001eb079680 | Intron 4 |
| 1157 | Zm00001eb079680 | Intron 5 |
| 1158 | Zm00001eb079680 | Intron 6 |
| 1159 | Zm00001eb079680 | Intron 7 |
| 1160 | Zm00001eb092070 | Intron 1 |
| 1161 | Zm00001eb092070 | Intron 2 |
| 1162 | Zm00001eb092070 | Intron 3 |
| 1163 | Zm00001eb095960 | Intron 1 |
| 1164 | Zm00001eb095960 | Intron 2 |
| 1165 | Zm00001eb095960 | Intron 3 |
| 1166 | Zm00001eb146780 | Intron 1 |
| 1167 | Zm00001eb146780 | Intron 2 |
| 1168 | Zm00001eb146780 | Intron 3 |
| 1169 | Zm00001eb146780 | Intron 4 |
| 1170 | Zm00001eb173290 | Intron 1 |
| 1171 | Zm00001eb173290 | Intron 2 |
| 1172 | Zm00001eb173290 | Intron 3 |
| 1173 | Zm00001eb173290 | Intron 4 |
| 1174 | Zm00001eb173290 | Intron 5 |
| 1175 | Zm00001eb173290 | Intron 6 |
| 1176 | Zm00001eb173290 | Intron 7 |
| 1177 | Zm00001eb202400 | Intron 1 |
| 1178 | Zm00001eb202400 | Intron 2 |
| 1179 | Zm00001eb202400 | Intron 3 |
| 1180 | Zm00001eb202400 | Intron 4 |
| 1181 | Zm00001eb215710 | Intron 1 |
| 1182 | Zm00001eb215710 | Intron 2 |
| 1183 | Zm00001eb215710 | Intron 3 |
| 1184 | Zm00001eb216070 | Intron 1 |
| 1185 | Zm00001eb216070 | Intron 2 |
| 1186 | Zm00001eb216070 | Intron 3 |
| 1187 | Zm00001eb216070 | Intron 4 |
| 1188 | Zm00001eb218000 | Intron 1 |
| 1189 | Zm00001eb218000 | Intron 2 |
| 1190 | Zm00001eb220480 | Intron 1 |
| 1191 | Zm00001eb220480 | Intron 2 |
| 1192 | Zm00001eb220480 | Intron 3 |
| 1193 | Zm00001eb220480 | Intron 4 |
| 1194 | Zm00001eb232910 | Intron 1 |
| 1195 | Zm00001eb232910 | Intron 2 |
| 1196 | Zm00001eb246220 | Intron 1 |
| 1197 | Zm00001eb246220 | Intron 2 |
| 1198 | Zm00001eb246220 | Intron 3 |
| 1199 | Zm00001eb246220 | Intron 4 |
| 1200 | Zm00001eb246220 | Intron 5 |
| 1201 | Zm00001eb246220 | Intron 6 |
| 1202 | Zm00001eb246220 | Intron 7 |
| 1203 | Zm00001eb246220 | Intron 8 |
| 1204 | Zm00001eb246220 | Intron 9 |
| 1205 | Zm00001eb267280 | Intron 1 |
| 1206 | Zm00001eb267280 | Intron 2 |
| 1207 | Zm00001eb267280 | Intron 3 |
| 1208 | Zm00001eb267280 | Intron 4 |
| 1209 | Zm00001eb267280 | Intron 5 |
| 1210 | Zm00001eb275020 | Intron 1 |
| 1211 | Zm00001eb275020 | Intron 2 |
| 1212 | Zm00001eb282650 | Intron 1 |
| 1213 | Zm00001eb282650 | Intron 2 |
| 1214 | Zm00001eb282650 | Intron 3 |
| 1215 | Zm00001eb282650 | Intron 4 |
| 1216 | Zm00001eb282650 | Intron 5 |
| 1217 | Zm00001eb282650 | Intron 6 |
| 1218 | Zm00001eb282650 | Intron 7 |
| 1219 | Zm00001eb282650 | Intron 8 |
| 1220 | Zm00001eb282650 | Intron 9 |
| 1221 | Zm00001eb282650 | Intron 10 |
| 1222 | Zm00001eb282650 | Intron 11 |
| 1223 | Zm00001eb331340 | Intron 1 |
| 1224 | Zm00001eb331340 | Intron 2 |
| 1225 | Zm00001eb331340 | Intron 3 |
| 1226 | Zm00001eb331340 | Intron 4 |
| 1227 | Zm00001eb331340 | Intron 5 |
| 1228 | Zm00001eb331340 | Intron 6 |
| 1229 | Zm00001eb331340 | Intron 7 |
| 1230 | Zm00001eb331340 | Intron 8 |
| 1231 | Zm00001eb331340 | Intron 9 |
| 1232 | Zm00001eb331340 | Intron 10 |
| 1233 | Zm00001eb331340 | Intron 11 |
| 1234 | Zm00001eb331340 | Intron 12 |
| 1235 | Zm00001eb331340 | Intron 13 |
| 1236 | Zm00001eb331340 | Intron 14 |
| 1237 | Zm00001eb335830 | Intron 1 |
| 1238 | Zm00001eb335830 | Intron 2 |
| 1239 | Zm00001eb335830 | Intron 3 |
| 1240 | Zm00001eb335830 | Intron 4 |
| 1241 | Zm00001eb335830 | Intron 5 |
| 1242 | Zm00001eb335830 | Intron 6 |
| 1243 | Zm00001eb335830 | Intron 7 |
| 1244 | Zm00001eb335830 | Intron 8 |
| 1245 | Zm00001eb335830 | Intron 9 |
| 1246 | Zm00001eb335830 | Intron 10 |
| 1247 | Zm00001eb335830 | Intron 11 |
| 1248 | Zm00001eb345620 | Intron 1 |
| 1249 | Zm00001eb345620 | Intron 2 |
| 1250 | Zm00001eb345620 | Intron 3 |
| 1251 | Zm00001eb345620 | Intron 4 |
| 1252 | Zm00001eb345620 | Intron 5 |
| 1253 | Zm00001eb345620 | Intron 6 |
| 1254 | Zm00001eb345620 | Intron 7 |
| 1255 | Zm00001eb345620 | Intron 8 |
| 1256 | Zm00001eb345620 | Intron 9 |
| 1257 | Zm00001eb345620 | Intron 10 |
| 1258 | Zm00001eb345620 | Intron 11 |
| 1259 | Zm00001eb348450 | Intron 1 |
| 1260 | Zm00001eb348450 | Intron 2 |
| 1261 | Zm00001eb348450 | Intron 3 |
| 1262 | Zm00001eb369310 | Intron 1 |
| 1263 | Zm00001eb369310 | Intron 2 |
| 1264 | Zm00001eb369310 | Intron 3 |
| 1265 | Zm00001eb411820 | Intron 1 |
| 1266 | Zm00001eb411820 | Intron 2 |
| 1267 | Zm00001eb411820 | Intron 3 |
| 1268 | Zm00001eb411820 | Intron 4 |
| 1269 | Zm00001eb411820 | Intron 5 |
| 1270 | Zm00001eb411820 | Intron 6 |
| 1271 | Zm00001eb411820 | Intron 7 |
| 1272 | Zm00001eb411820 | Intron 8 |
| 1273 | HORVU.MOREX.r3.4HG0337850.1 | Intron 1 |
| 1274 | HORVU.MOREX.r3.4HG0337850.1 | Intron 2 |

[0067] In various embodiments, non-coding regions such as the introns of genes described herein are used as “horses” to carry regulatory nucleic acids and/or nucleic acid sequences encoding small regulatory peptides. Upon transcription and mRNA splicing such regulatory nucleic acids can move to the cytoplasm of the cells where they can exert functions such as gene silencing of endogenous gene targets or gene targets from pests and disease-causing organisms or encodes small peptides with regulatory functions related to plant growth, development, acquisition of nutrients and water, or immunological response against pests and diseases. In some embodiments, the natural mRNA transcript from the gene that has a modified (e.g., genetically edited) intron, upon transcription and mRNA splicing, give rise to the natural mRNA of the said gene. The natural mRNA moves to the cytoplasm of the cell and is translated into the natural protein and thus, the natural function of the gene/protein is preserved.

### Nuclease Recognition Sites

[0068] Provided herein are cells comprising a non-coding region, e.g., a first intron region, that comprises a nuclease recognition site. In some embodiments, a nuclease is a CRISPR associated nuclease. In a particular embodiment, the CRISPR associated nuclease comprises Cas9. In other embodiments, a nuclease is a Transcription Activator-Like Effector Nuclease (TALEN).

[0069] Non-limiting examples of the nuclease recognition site are disclosed in Table 3. In some embodiments, the nuclease recognition sites may be, as for example, intronic sequences of the gene ACTIN 1 from rice, soybean, barley, tomato, sorghum, and maize. For example, some introns of ACTIN 1 or of ACTIN 1 homologue from six organisms are shown in Table 3. The nuclease (Cas9) recognition sequences guided by a guide RNA (sRNA) are as follow: 20 nucleotides (underlined) upstream of PAM motif (bold, underlined). The PAM motif is 3′NGG in the forward direction or 5′CCN in the reverse direction. The double strand DNA cleavage by Cas9 is 3 nucleotides before PAM comprising the underlined region.

TABLE 3
Examples of nuclease recognition site. The first column (SEQ ID NO)
contains the sequence identifier of non-limiting examples of nuclease recognition
site(s) of each endogenous introns of ACTIN 1 homologue from six organisms (SEQ ID
NOS: 1275-1284). The second column contains the organism and the code identifier
of the gene deposited in EnsemblPlants database described in Table 1, in addition
to the intron region of the corresponding gene. The third column contains the
sequence of the intron, with 20 nucleotides (underlined) upstream of PAM motif
(bold, underlined), necessary to the nuclease (Cas9) recognition.

| | Organism, gene | |
|---|---|---|
| SEQ ID | and intron | |
| NO | identification | Sequence of intron with nuclease recognition site(s) |
| 1275 | rice_Os03t0718100 | GTAAGCTGTTTGGATCTCAGGGTGGTTTCCGTTTAC |
| | -01 intron 1 | CGAAATGCTGCATTTCTTGGTAGCAAAACTGAGGT |
| | | GGTTTGTGTCAG |
| 1276 | rice_Os03t0718100 | GTGAGCACATTCGACACTGAACTAAAAGGCTGTGA |
| | -01 intron 2 | GGATGAATTTTAATTTTGACATTCACATGTAGATGA |
| | | GATTTAGTTCTGCAATCTTCAATTGTCATACAGCAA |
| | | GACTATATAATAGCTTTCAAAATAAAATCATAGGCA |
| | | GTTCTCATAAATGGAATCATGTTTGAACATCCTAAT |
| | | TCTGTTGGCATGGAGTGCTTTGACATTTTGATGTGC |
| | | TACAGTTGTGAATAACTGAATTTCCTTTTCCCAG |
| 1277 | soybean_GLYMA_ | GTAAGCAATTTTTTATTTGTTTGGTTAGCTTGAGGCT |
| | 02G091900 intron | GTATAGTTTGAACTTATCTGGGAACTTTGAAATTGA |
| | 2 | AATAAACACATGTCAACATCCATTAGCATCTATAAA |
| | | GTCTGTATGTTCAACATTGCATTTCCAGATATATTA |
| | | GAATAAACTGAAAATGATTCATTTCATTGTGAATGA |
| | | TTTCACTTGACATATTACTAAATGGGGAAGAAACAC |
| | | ATTCTGTGAACTGCATTGCATTTGGAAATTGTGATT |
| | | GTAGAAAACTTGTATAAAGCTTCCATATATCATGTG |
| | | ATTGACTTTATAAACTTCATTTATTTGCCTTCTTTTT |
| | | GCAG |
| 1278 | barley_HORVU. | GTAACGACCATCTCATGCCCCCCCTCCTCCTCCTCCC |
| | MOREX.r3.4HG0337850.1 | CGCCCCGATCGATCATTCTCTCCCCAGATGAGATCC |
| | intron 1 | GCCCCGCATTGCGCGCCCCCTTGCGCTCACCATCAG |
| | | GCCCGATCGATCCGATCTCGCGGCGGGCCCCGGCGC |
| | | CGGCTCCCCCTCTTCCCGCCGCGGATCCGACCGGAT |
| | | CTCGCGGAATGGGAGCGAGCGAGCGCCCGCCGCGT |
| | | TTTTTTTTATTTTCGTGCCGCCGCGGGAATGTAGAT |
| | | CTGCCGCCCGCGATCTGGGCCGTTTCGGGTGCCGG |
| | | AGCGCTCCGATCCGCGCCGCGGTGCCAGAGAACCA |
| | | TGCTCTCTCTGTTCCCTTATTAACTGTTCTTGTCGCT |
| | | AAGCCTCGCGGTTAACATGCCAGCCATTGCGGTTA |
| | | GGGGTTCCTCGTGAACTGATTGATAGTACTACTCAT |
| | | CATGTTTCTTCGAAGGAGAAAAATAATAATCTCTGC |
| | | ATTTATTTAGCCAGCGTCCTTCACTGCTAGGATGCG |
| | | TAGATTCTCCTTTGATCGACCGATCGATGTGTAATA |
| | | ATAACCGTGGCTTCCTGCGAGCTTCTGCTGTAG |
| 1279 | barley_HORVU. | GTGAGCCGCTGCATCCCACGAGCGTTCTTGCATCTT |
| | MOREX.r3.4HG0337850.1 | TGGTTCAGGGAAATGCCGCAGTGCTCTTTGTGACAT |
| | intron 2 | AACACTTGTGGTGGTGATGATGCTTGCAG |
| 1280 | tomato | GTAATCTCGACGAATTTAGAATTATATGAAAATGAT |
| | Solyc11g065990.2 | TCAATATCGTGTTTATTAATCGTTTAGTGTTTGGCAT |
| | intron 1 | GAATTTAGAATTTAAAATTGTATGAGAATGATTCAA |
| | | AATCGTGTCTATGGATATTGTAG |
| 1281 | sorghum_SORBI__ | GTAATGATTCGTTCACATGGTGACCAAATTTCATTA |
| | 3005G047100 | GGACCTCCAATTTTTTTAGCGCAAAGGACCTCCAAA |
| | intron 2 | ATTTTCACTCTTAATTATGGATTGCTGTGGTTCATTC |
| | | AG |
| 1282 | sorghum | GTTAAAAAACTTGCACTTTTTTGTTTGTTTCCAGTTG |
| | SORBI_3005G047100 | CTATGGCAAATATTGCAACCGTTCAGTAGTTCTAGT |
| | intron 3 | ATTTCTTTGTACTGAAAAAATATGCTCTGGTATTAT |
| | | TTTTGTACAG |
| 1283 | maize_ | GTGAGCTGATTCCGTTCTCTGCTTAACAATTTCCAA |
| | Zm00001eb216070_T001 | ATCCGATTTGCTCCTGCAGTCCGTTATCTCTAATATC |
| | intron 3 | TGTGGCTTCCCCTCTCTCAG |
| 1284 | maize_ | GTAAAACAAACAAACAAATTTCGCATTCGCATTTCC |
| | Zm00001eb216070_T001 | TCAATCAAGGTCTGCTCACGATTTTGCTTGCGACTG |
| | intron 4 | CAG |

[0070] In various embodiments using a CRISPR system, gRNA is used to guide the Cas protein (e.g., Cas9) to recognition sites for targeted cleavage. Non-limiting examples of gRNA are described in Table 4. The name of each gRNA sequence is a number representing the position into the respective intron sequence of Table 3. The position is followed by the orientation of PAM motif into the respective intron sequence of Table 3. (forw is in the forward orientation, rev is in the reverse orientation). In one aspect, the gRNA comprises 17-22 nucleotides in length (not considering the PAM motif), and 20-80% of GC content, and absence of TT-motif or GGC motif, and specificity score equal or superior to 80. In one aspect, the gRNA is a sequence wherein the corresponding cleavage site in the intron is distant at least 20 nucleotides from the intronic 5′ splice site (GU intron signal), and at least 45 nucleotides distant from the intronic 3′ splice site (AG intron signal), and out of the UA-rich element (a region of 4-7 nucleotides UA-rich, normally TTTTTAT present along the intronic regions of the gene).

TABLE 4
Examples of gRNAs. The second column describes the origin of non-
limiting examples of gRNAs (organism and the code identifier of the respective gene
from Table 3, in addition to the intron region of the correspondent gene). The third
column describes the name of each gRNA, comprising the position into the respective
intron sequence and the orientation of PAM motif. The four column contains the sequence
of each sRNA comprising 20 nucleotides upstream of PAM motif (bold), necessary to the
nuclease (Cas9) recognition. The first column (SEQ ID NO) contains the sequence
identifier of exemplified gRNA sequences (SEQ ID NOS: 1285-1315).

| SEQ | | gRNA name | |
|---|---|---|---|
| ID | | (position and | |
| NO | gRNA origin | orientation) | gRNA Sequence |
| 1285 | rice_Os03t0718100-01 intron 1 | 23forw | AAGCTGTTTGGATCTCAGGGTGG |
| 1286 | guide RNA sequences | 29rev | AAATGCAGCATTTCGGTAAACGG |
| 1287 | | 68forw | ATTTCTTGGTAGCAAAACTGAGG |
| 1288 | | 71forw | TCTTGGTAGCAAAACTGAGGTGG |
| 1289 | rice_Os03t0718100-01 intron 2 | 27forw | ACATTCGACACTGAACTAAAAGG |
| 1290 | guide RNA sequences | 35forw | CACTGAACTAAAAGGCTGTGAGG |
| 1291 | | 155forw | TCATAGGCAGTTCTCATAAATGG |
| 1292 | | 174rev | CACTCCATGCCAACAGAATTAGG |
| 1293 | | 185forw | TTTGAACATCCTAATTCTGTTGG |
| 1294 | | 190forw | ACATCCTAATTCTGTTGGCATGG |
| 1295 | soybean_GLYMA_02G091900 | 93rev | ACAGACTTTATAGATGCTAATGG |
| | intron 2 guide RNA sequences | | |
| 1296 | barley_HORVU.MOREX.r3. | 103rev | ATCGGATCGATCGGGCCTGATGG |
| 1297 | 4HG0337850.1 intron 2 guide | 234rev | GCAGATCTACATTCCCGCGGCGG |
| 1298 | RNA sequences | 237rev | GCGGCAGATCTACATTCCCGCGG |
| 1299 | | 268forw | TAGATCTGCCGCCCGCGATCTGG |
| 1300 | | 269forw | AGATCTGCCGCCCGCGATCTGGG |
| 1301 | | 294rev | TCTGGCACCGCGGCGCGGATCG |
| 1302 | | 363rev | TGGCTGGCATGTTAACCGCGAGG |
| 1303 | | 368forw | GTTCTTGTCGCTAAGCCTCGCGG |
| 1304 | | 379rev | GAACCCCTAACCGCAATGGCTGG |
| 1305 | | 394forw | ACATGCCAGCCATTGCGGTTAGG |
| 1306 | | 401rev | GTACTATCAATCAGTTCACGAGG |
| 1307 | | 546forw | TCGATGTGTAATAATAACCGTGG |
| 1308 | barley_HORVU.MOREX.r3. | 15rev | AAAGATGCAAGAACGCTCGTGGG |
| | 4HG0337850.1 intron 2 guide | | |
| | RNA sequence | | |
| 1309 | tomato_Solyc11g065990.2 | 121forw | ATGATTCAAAATCGTGTCTATGG |
| | intron 1 RNA sequence | | |
| 1310 | sorghum_ | 40rev | CTTTGCGCTAAAAAAATTGGAGG |
| | SORBI_3005G047100 intron 2 | | |
| 1311 | guide RNA sequence | 100forw | CTCTTAATTATGGATTGCTGTGG |
| 1312 | sorghum_SORBI_3005G047100 | 31rev | GCAATATTTGCCATAGCAACTGG |
| 1313 | intron 3 guide RNA sequences | 101forw | TGTACTGAAAAAATATGCTCTGG |
| 1314 | maize_Zm00001eb216070_T001 | 76forw | TCCGTTATCTCTAATATCTGTGG |
| | intron 3 guide RNA sequence | | |
| 1315 | maize_Zm00001eb216070_T001 | 35rev | TCGTGAGCAGACCTTGATTGAGG |
| | intron 4 guide RNA sequences | | |

[0071] In certain embodiments, the nuclease is fused to a VirD2 protein. VirD2 protein is one of the key proteins of Agrobacterium tumefaciens and involved in T-DNA processing and transfer. VirD2 contains an endonuclease domain as well as two nuclear localization signals (NLS), which can target marker proteins to the host-plant genome. VirD2 is tightly linked to the T-DNA by covalent binding and transported to the host-plant genome. In certain embodiments, the nuclease described herein may be fused to VirD2, thereby increasing the efficiency of integration of the non-coding, e.g., intron of the genes.

[0072] The nucleic acid sequence and amino acid sequence of VirD2 are described in Table 5. In some embodiments, the nuclease is fused to a VirD2 protein. In some embodiments, the amino acid sequence of VirD2 protein is at least 80%, 81%, 82%, 83%, 84%, 85%, 86%, 87%, 88%, 89%, 90%, 91%, 92%, 93%, 94%, 95%, 96%, 97%, 98%, 99%, or is 100% identical to the amino acid sequence of Table 5. In some embodiments, the sequence encoding the nuclease further comprises a sequence encoding VirD2. In some embodiments, the sequence encoding VirD2 is a sequence at least 80%, 81%, 82%, 83%, 84%, 85%, 86%, 87%, 88%, 89%, 90%, 91%, 92%, 93%, 94%, 95%, 96%, 97%, 98%, 99%, or is 100% identical to the nucleic acid sequence of Table 5.

TABLE 5
VirD2 sequences. The first column (SEQ ID NO) contains the sequence identifier
of an example of a sequence of VirD2 gene and its correspondent protein (SEQ ID
NOS: 1316-1317). The second column contains the information describing if the
sequence is a gene or a protein. The third column contains the sequence of an
example of VirD2 gene and its corresponding amino acid sequence.

| SEQ ID | | |
|---|---|---|
| NO | VirD2 | Sequence |
| 1316 | VirD2 open | ATGCCTGACAGAGCACAGGTAATCATACGGATTGTTCCTGGAGGAGGC |
| | read frame | ACCAAAACGCTGCAACAGATCATCAACCAACTTGAGTATTTGAGCAGG |
| | | AAAGGAAAACTAGAGCTTCAGCGATCTGCAAGACACCTGGACATTCCT |
| | | GTACCTCCCGATCAGATCAGAGAGTTAGCACAATCATGGGTTACAGAG |
| | | GCTGGCATTTACGATGAGTCTCAATCTGATGACGACAGGCAGCAAGAT |
| | | CTGACGACACATATCATTGTCTCCTTCCCAGCGGGGACAGATCAAACT |
| | | GCCGCTTATGAGGCCAGCCGAGAATGGGCTGCAGAGATGTTTGGAAGT |
| | | GGTTATGGTGGGGGGCGCTACAACTACTTGACCGCTTACCATGTTGAT |
| | | AGAGATCATCCACACTTGCACGTCGTAGTGAATAGAAGGGAACTCCTT |
| | | GGCCAAGGATGGCTTAAAATTTCGCGCCGGCATCCTCAGTTGAATTAT |
| | | GATGGTCTCCGTAAGAAGATGGCTGAGATCTCACTCCGTCACGGAATT |
| | | GTGTTAGATGCTACTTCCCGAGCAGAAAGAGGGATTGCTGAGAGGCCC |
| | | ATAACATATGCTGAATACAGAAGATTAGAAAGAATGCAAGCTCAGAA |
| | | GATTCAGTTTGAAGACACTGATTTTGATGAAACATCACCAGAAGAGGA |
| | | TCGCAGGGATCTTTCTCAGTCTTTCGATCCTTTCAGGAGTGATGCATCA |
| | | GCCGGAGAACCCGACCGAGCTACTAGACACGACAAACAACCACTTGA |
| | | GCCTCATGCAAGATTCCAAGAACCTGCTGGTTCCTCTATCAAAGCTGAT |
| | | GCCCGAATAAGGGTTCCGTTGGAGTCTGAGAGAGGGGCGCAGCCATCA |
| | | GCGTCCAAGATACCAGTGACCGGTCATTTTGGTATTGAAACTTCTTATG |
| | | TGGCTGAAGCATCAGTTCCGAAGCAGAGTGGAAATTCAGACACAAGC |
| | | AGACCAGTCACGGATGTTGCTATGCATACTGTGGAGCGGCAACAAAGA |
| | | TCAAAGAGAAGGCATGATGAAGAAGCTGGACCGTCGGGCGCCAATCG |
| | | GAAACGTCTCAAGGCGGCTCAAGTGGACTCTGAAGCAAATGTTGGTGA |
| | | ACCGGATGGAAGAGACGATTCGAACAAAGCGGCAGATCCAGTTAGTG |
| | | CTAGTATAAGAACAGAACAACCTGAAGCAAGCCCGACCTGTCCTCGTG |
| | | ATCGTCATGACGGTGAGCTAGGGGAGCGTAAGAGAGCTAGGGGAAAC |
| | | AGACGAGATGATGGAAGGGGTGGTACTTGA |
| 1317 | VirD2 | MPDRAQVIIRIVPGGGTKTLQQIINQLEYLSRKGKLELQRSARHLDIPVPPD |
| | protein | QIRELAQSWVTEAGIYDESQSDDDRQQDLTTHIIVSFPAGTDQTAAYEASR |
| | | EWAAEMFGSGYGGGRYNYLTAYHVDRDHPHLHVVVNRRELLGQGWLKI |
| | | SRRHPQLNYDGLRKKMAEISLRHGIVLDATSRAERGIAERPITYAEYRRLE |
| | | RMQAQKIQFEDTDFDETSPEEDRRDLSQSFDPFRSDASAGEPDRATRHDK |
| | | QPLEPHARFQEPAGSSIKADARIRVPLESERGAQPSASKIPVTGHFGIETSYV |
| | | AEASVPKQSGNSDTSRPVTDVAMHTVERQQRSKRRHDEEAGPSGANRKR |
| | | LKAAQVDSEANVGEPDGRDDSNKAADPVSASIRTEQPEASPTCPRDRHDG |
| | | ELGERKRARGNRRDDGRGGT |

### Endogenous and Exogenous Nucleic Acids

[0073] Provided herein, in certain embodiments, are cells comprising an endogenous or exogenous nucleic acid in a non-coding region such as an intron (e.g., modified intron region), a 5′ non-coding region, or a 3′ non-coding region. In certain aspects, the endogenous or exogenous nucleic acid is transcribed from a native promotor of the gene comprising the non-coding region, e.g., intron. In some embodiments, the promotor is a constitutive promotor. In one aspect, the promotor is specific for a plant organ. Examples of the plant organ include, not limited to, a root, stem, fruit, seed, and leaf. In another aspect, the promoter is specific for a plant tissue. Examples of the plant tissue include, but not limited to, a ground tissue, vascular tissue, and dermal tissue. In certain aspects, the promoter is an endogenous promoter of a gene encoding a native protein. In some embodiments, the promoter drives the expression of the genes described in Table 1. The endogenous or exogenous nucleic acid may be exogenous to the cell. The endogenous or exogenous nucleic acid may be exogenous to the non-coding region. The endogenous or exogenous nucleic acid may be endogenous to the cell. The endogenous or exogenous nucleic acid may be endogenous to the cell, and exogenous to the non-coding region. The endogenous or exogenous nucleic acid may be endogenous to the non-coding region.

[0074] In some embodiments, the endogenous or exogenous nucleic acid is at least 10, 20, 30, 40, 50, 60, 70, 80, 90, 100, 110, 120, 130, 140, 150, 160, 170, 180, 190, 200, 210, 220, 230, 240, 250, 260, 270, 280, 290, 300 or more bases in length (e.g., up to about 700 bases in length). In some embodiments, the endogenous or exogenous nucleic acid is fewer than 10, 20, 30, 40, 50, 60, 70, 80, 90, 100, 110, 120, 130, 140, 150, 160, 170, 180, 190, 200, 210, 220, 230, 240, 250, 260, 270, 280, 290, or 300 bases in length. In some embodiments, the endogenous or exogenous nucleic acid is about 10 to about 700, about 10 to about 200, about 10 to about 180, about 10 to about 160, about 10 to about 140 bases, about 10 to about 120 bases, about 10 to about 110 bases, or about 10 to about 100 bases in length. In some embodiments, the exogenous nucleic acid is less than 700, 600, 500, 400, 300, 280, 260, 240, 220, 200, 180, 160, 140, 120, 100, 80, 60, 40, 20 bases in length. In some embodiments, the exogenous nucleic acid is positioned within the genome of the cell. In some embodiments, the exogenous nucleic acid is not present on a plasmid.

miRNAs

[0075] In one aspect, the endogenous or exogenous nucleic acid encodes a microRNA (miRNA). In some embodiments, the exogenous miRNA is an artificial microRNA (amiRNA). miRNA is a small single-stranded RNA that functions in RNA silencing and post-transcriptional regulation. miRNA contains complementary base pairs to its target mRNA molecule, thereby repressing gene expression of the target mRNA. As a result, the target mRNA is silenced via one of the following processes: breakdown of the mRNA strand, destabilization of the mRNA through shortening of its polyA, and inefficient translation of the mRNA into proteins. In various embodiments, a regulatory nucleic acid to be inserted into the non-coding region, e.g., intron of genes, described herein may be a micro-RNA (mi-RNA) or an artificial micro-RNA (amiRNA). Upon mRNA transcription and splicing, such miRNA or amiRNA moves into the cell cytoplasm and silence the target gene.

[0076] In some embodiments, the endogenous or exogenous miRNA is a precursor miRNA. In other embodiments, the endogenous or exogenous miRNA is a mature miRNA. In some embodiments, the mature miRNA comprises about 1, 2, 3, 4, 5, 6, 7, 8, 9, 10, 11, 12, 13, 14, 15, 16, 17, 18, 19, 20, 21, 22, 23, 24, 25, 26, 27, 28, 29, 30, or more nucleotides. In some embodiments, miRNA comprises about 21-22 nucleotides. In some embodiment, the miRNA can be expressed as short tandem target mimic (STTM), which harbors two copies of small RNA (e.g., 10-30 nucleotides) partially complementary sequences linked by a short spacer. Designed spacers can be with different lengths such as about 6 to about 60 nucleotides (e.g., 8, 31, to 48 nucleotides).

[0077] In some embodiments, the miRNA specifically binds to a target nucleic acid. In some embodiments, the target nucleic acid is endogenous and/or exogenous to the cell. Non-limiting examples of the target nucleic acid endogenous and/or exogenous to the cell are described in Table 6. In some embodiments, the target nucleic acid is from an insect and/or worm that is harmful to the cell. Non-limiting examples of the insect and/or worm are described in Table 6. Non-limiting examples of the target nucleic acid from the insect and/or worm are described in Table 6. In other embodiments, the target nucleic acid is from an organism that causes a disease to the cell. Non-limiting examples of the organism are described in Table 6. Non-limiting examples of the target nucleic acid from the organism that causes a disease to the cell are described in Table 6.

[0078] In various embodiments, the target nucleic acid is a target mRNA. In some embodiments, the target mRNA comprises a sequence at least 70%, 71%, 72%, 73%, 74%, 75%, 76%, 77%, 78%, 79%, 80%, 81%, 82%, 83%, 84%, 85%, 86%, 87%, 88%, 89%, 90%, 91%, 92%, 93%, 94%, 95%, 96%, 97%, 98%, 99%, or is 100% identical to a sequence of Table 6. In one aspect, the target mRNA encodes for a target gene. Non-limiting examples of the target gene are described in Table 6. In some embodiments, the target gene comprises a sequence at least 70%, 71%, 72%, 73%, 74%, 75%, 76%, 77%, 78%, 79%, 80%, 81%, 82%, 83%, 84%, 85%, 86%, 87%, 88%, 89%, 90%, 91%, 92%, 93%, 94%, 95%, 96%, 97%, 98%, 99%, or is 100% identical to a sequence of Table 6. In some embodiments, the endogenous or exogenous miRNA comprises a sequence at least 70%, 71%, 72%, 73%, 74%, 75%, 76%, 77%, 78%, 79%, 80%, 81%, 82%, 83%, 84%, 85%, 86%, 87%, 88%, 89%, 90%, 91%, 92%, 93%, 94%, 95%, 96%, 97%, 98%, 99%, or is 100% identical to a sequence of Table 6.

TABLE 6
Examples of target nucleic acids. The first column contains non-limiting target pests (binomial
scientific names and organisms). The second column contains non-limiting target gene(s)
of each example target pest. The sequence of each target gene on second column is available
in the formal sequence listing filed herewith by reference to the SEQ ID NO in parenthesis
(SEQ ID NOS: 1318-1460) and defines the gene sequence described in the table. The third
column describes examples of hosts (crops and other plants) of the target pest.

| Target pest | Target gene(s) (SEQ ID NO) | Hosts (example) |
|---|---|---|
| Pseudomonas syringae | corP (1318), AvrB (1319), | Wide range, cereal crops |
| (bacterium) | HopBB1 (1320), HopX1 (1321), | |
| | HopZ1a (1322) | |
| Ralstonia solanacearum | PopP2 (1323), RipI (1324) | Wide range |
| (bacterium) | | |
| Xanthomonas oryzae pv. oryzae | Xopr (1325), PthXo1 (1326), | Wide range |
| (bacterium) | PthXo2 (1327), PthXo3 (1328), | |
| | AvrXa7 (1329), TalC (1330), | |
| | TALE1 (1331), TALE2 (1332), | |
| | TALE3 (1333), TALE7 (1334), | |
| | TALE12 (1335) | |
| Xanthomonas translucens pv. | tal8 (1336) | Wide range |
| undulosa | | |
| (bacterium) | | |
| Xanthomonas campestris pathvars | AvrXccE1 (1337), AvrXccB | Wide range |
| (bacterium) | (1338), XopE2 (1339), XopJ | |
| | (1340) | |
| Clavibacter michiganensis | chpC (1341) | tomato |
| (bacterium) | | |
| Erwinia amylovora | HrpN (1342) | fruit trees, ornamentals, |
| (bacterium) | | bushes |
| Phakopsora pachyrhizi | CSEP-07 (1343), CSEP-09 | soybean |
| (fungus) | (1344), acetyl-CoA | |
| | acyltransferase (1345), 40S | |
| | ribosomal protein S16 (1346), | |
| | Glycine cleavage system | |
| | H protein (1347) | |
| Ustilago maydis | Cmu1 (1348) | maize |
| (fungus) | | |
| Magnaporthe oryzae | AvrPi9 (1349), AVR-Pita1 | rice |
| (fungus) | (1350), AVR-Pita2 (1351), Pwl1 | |
| | (1352), Pwl2 (1353) | |
| Cladosporium fulvum | Avr4 (1354) | tomato |
| (fungus) | | |
| Botrytis cinerea | BCG1 (1355) | Wide range |
| (fungus) | | |
| Puccinia spp. | Avirulence factor (1356), | Wheat |
| (fungus) | AvrSr35 (1357) | |
| Fusarium oxysporum | Fmk1 (1358), rho1 (1359) | Tomato, melon, cotton, |
| (fungus) | | banana |
| Fusarium graminearum | CYP51A (1360), CYP51B | barley |
| (fungus) | (1361), CYP51C (1362) | |
| Phytophthora infestans | Avrblb2 (1363), AVR3a (1364) | Potato, tomato |
| (oomycete) | | |
| Phytophthora ramorum | RXLR (1365) | hardwood trees, |
| (oomycete) | | ornamentals |
| Phytophthora sojae | PsojNIP (1366), RXLR (1367), | soybean |
| (oomycete) | CRN114 (1368) | |
| Phytophthora capsica | CRN (1369) | Pepper, tomato, lima, |
| (oomycete) | | snap beans, cucurbit |
| Phytophthora parasitica | CBEL (1370), NPP1 (1371) | Wide range |
| (oomycete) | | |
| Meloidogyne spp. | Calreticulin (1372), NodL (1373), | Wide range |
| (nematode) | GPCR (1374), collagen (1375), | |
| | 14-3-3 (1376), Cysteine protease | |
| | (1377), gsts-1 (1378), Venom | |
| | allergen-like protein (1379) | |
| Heterodera spp. | CLAVATA3 (1380), Annexin | Soybean, Potato, sugar |
| (nematode) | 4C10 (1381), Annexin Hs4F01 | beet |
| | (1382), Transthyretin-like protein | |
| | precursor (1383), Ubi1 (1384), | |
| | Venom allergen-like protein | |
| | (1385) | |
| Pratylenchus spp. | pat-10 (1386), unc-87 | crop and ornamental |
| (nematode) | (1387), beta-1,4-endoglucanase | plants |
| | (1388) | |
| Radopholus similis | Transthyretin-like protein (1389), | Banana, citrus crops, |
| (nematode) | xyl1 (1390) | pepper |
| Helicoverpa armigera | Rack1 (1391), GAPDH (1392), | Soybean, maize, cotton, |
| (insect) | chitinase (1393) | wide range |
| Anticarvsia gemmatalis | GAPDH (1394) | Soybean, wide range |
| (insect) | | |
| Spodoptera frugiperda | chitinase (1395), cuticular protein | Maize, soybean, cotton, |
| (insect) | (1396) | tobacco, wheat, cassava |
| Chrysodeixis includens | Actin (1397), GAPDH (1398) | Soybean, wide range |
| (insect) | | |
| Diabrotica virgifera | chitinase 10 (1399), chitinase 2 | maize |
| (insect) | (1400), GAPDH (1401) | |
| Leptinotarsa decemlineata | PSMB5 (1402) | potato |
| (insect) | | |
| Bemisia tabaci | TLR7 (1403) | Bean, Wide range |
| (insect) | | |
| Myzus persicae | MpC002 (1404), cuticular protein | Potato, tomato |
| (insect) | (1405), GAPDH (1406), V- | |
| | ATPase-A (1407) | |
| Nephotettix cincticeps | NcSP75 (1408) | rice |
| (insect) | | |
| Tobacco mosaic virus | CP (1409), MP (1410), | tobacco |
| (virus) | | |
| Tomato spotted wilt virus | CP (1411) | Wide range, including |
| (virus) | | tomato, pepper, lettuce, |
| | | peanut, chrysanthemum |
| Tomato yellow leaf curl virus | CP (1412), MP (1413), Rep | Tomato, common bean, |
| (virus) | (1414), TrAP (1415), REn (1416), | sweet pepper, chilli |
| | C4 (1417) | pepper, tobacco |
| | | ornamentals, common |
| | | weeds |
| Cucumber mosaic virus | CP (1418), 2b supressor (1419), | Wide range, including |
| (virus) | 3a (1420), 1a (1421), 2a (1422) | tomato, pepper, melon |
| Potato virus Y | CP (1423) | Potato, tobacco, tomato, |
| (virus) | | pepper |
| African cassava mosaic virus | CP (1424), AV1 (1425), AV2 | cassava |
| (virus) | (1426), | |
| | AC1 (1427), AC2 (1428), AC3 | |
| | (1429), Rep (1430), Trap (1431), | |
| | AC4 (1432), BC1 (1433), BV1 | |
| | (1434) | |
| Plum pox virus | CP (1435), HC-Pro (1436) | stone fruit crops |
| (virus) | | |
| Potato virus X | TGBp1 (1437), TGBp2 (1438), | potato |
| (virus) | TGBp3 (1439), CP (1440) | |
| Citrus tristeza virus | CP (1441), p6 (1442), p65 (1443) | citrus |
| (virus) | p61 (1444), p20 (1445), p23 | |
| | (1446), p33 (1447), p18 (1448) | |
| | p13 (1449) | |
| Barley yellow dwarf virus | polymerase (1450), CP (1451), | Most grasses, oats, |
| (virus) | RTD (1452), | barley, wheat, maize, |
| | | rice |
| Potato leafroll virus | CP (1453), NSP (1454), MP | potato, tomato |
| (virus) | (1455) | |
| Bean golden mosaic virus | CP (1456), AC4 (1457), REP | bean |
| (virus) | (1458), TRAP (1459), REN | |
| | (1460) | |

### Small Peptides

[0079] In another aspect, the endogenous or exogenous nucleic acid encodes a peptide. In some embodiments, the peptide affects a property of the cell. Examples of the property of the cell include, but are not limited to, hormonal regulation, protection against a pathogen, protection against an insect, nitrogen fixation, nutrient acquisition, immunity induction, biotic stress, and abiotic stress.

[0080] In various embodiments, a regulatory nucleic acid to be inserted into the non-coding region, e.g., intron of the genes, described herein can be a nucleic acid sequence encoding a regulatory small peptide. Upon mRNA transcription and splicing, such nucleic acid sequence give rise to a mature mRNA that moves into the cell cytoplasm and is translated into a regulatory small peptide.

[0081] Non-limiting examples of the peptide and their biological functions thereof are described in Table 7.

TABLE 7
Non-limiting examples of small peptides. The first column
(Peptide Name) contains the name of non-limiting examples
of small peptides. The second column (Mature peptide sequence
length) contains the information of the length of the mature
small peptide in number of amino acid. The third column (Biological
function) contains the information of the known biological
function of the referred small peptide.

| Peptide | Mature peptide | |
|---|---|---|
| Name | sequence length (aa) | Biological function(s) |
| CEP1 | 15 | (Lateral) root development |
| CLE3 | 12-13 | Meristem maintenance, stem-cell |
| | | division, vascular development |
| IDA-IDL | 20 | Organ abscission, lateral root |
| | | emergence |
| PSK-α | 5 | Cell proliferation and differentiation, |
| | | cell expansion |
| PSY1 | 16-18 | Cell proliferation and differentiation, |
| | | cell expansion |
| RGF1 | 13 | Maintenance of root apical meristem |
| | | stem-cell niche, gravitropism, lateral |
| | | root development |

[0082] In some embodiments, a coding region of the peptide may be flanked by 5′ ribosomal binding site (RBS). In some embodiments, the RBS is at least 1, 2, 3, 4, 5, 6, 7, 8, 9, 10, 11, 12, 13, 14, 15, 16, 17, 18, 19, 20 or more base pair in length. In some embodiments, the RBS is about 1-50, 2-40, 3-30, 4-20, 5-10 base pair in length.

[0083] In some embodiments, the peptide is about 1, 2, 3, 4, 5, 6, 7, 8, 9, 10, 11, 12, 13, 14, 15, 16, 17, 18, 19, 20, 21, 22, 23, 24, 25, 26, 27, 28, 29, 30 or more amino acids in length. In some embodiments, the peptide is about 1-10, 1-20, 1-30, 2-10, 2-20, 2-30, 3-10, 3-20, 3-30, 4-10, 4-20, 4-30, 5-10, 5-20, 5-30, 6-10, 6-20, 6-30, 7-10, 7-20, 7-30, 8-10, 8-20, 8-30, 9-10, 9-20, 9-30, 10-20, or 10-30 amino acids in length. In some embodiments, the peptide is about 2-80, 3-80, 4-80, 5-80, 6-80, 7-80, 8-80, 9-80, 10-80, 20-80, 30-80, 40-80, 50-80, 60-80, 70-80 or 1-80 amino acids in length. In some embodiments, the peptide comprises a sequence at least 80% identical to a sequence of Table 8.

TABLE 8
Non-limiting examples of nucleic acid sequences encoding small peptides
The first column (SEQ ID NO) contains the sequence identifier of non-limiting examples
of small peptides (SEQ ID NOs 1461-1466). The second column (Peptide Name) contains the
name of non-limiting examples of small peptides. The third column (Mature peptide
sequence length) contains the information of the length of the mature small peptide in
number of amino acids. The fourth column (Precursor peptide sequence length) contains
the information of the length of the mRNA of the precursor peptide in number of
nucleotides. The fifth column (mRNA sequence) contains the acid nucleic sequence of
the mRNA of the referred precursor peptide.

| | | Mature | | mRNA of | |
|---|---|---|---|---|---|
| | | peptide | Precursor | precursor | |
| | | sequence | peptide | peptide | |
| SEQ ID | Peptide | length | sequence | sequence | |
| NO | name | (aa) | length (aa) | length (nt) | mRNA sequence |
| 1461 | CEP1 | 15 | 91 | 276 | ATGGGAATGTCGAATAGGTCAGTTTCT |
| | | | | | ACATCCATTTTTTTCCTTGCATTGGTGG |
| | | | | | TTTTGCATGGAATTCAGGACACAGAAG |
| | | | | | AGAGACATTTGAAAACTACTTCGTTAG |
| | | | | | AGATTGAGGGAATTTATAAAAAAACTG |
| | | | | | AGGCCGAGCATCCTAGCATTGTGGTCA |
| | | | | | CATATACACGGCGTGGTGTCCTTCAGA |
| | | | | | AGGAGGTCATTGCCCACCCCACAGACT |
| | | | | | TTAGGCCAACAAATCCCGGAAACAGCC |
| | | | | | CAGGCGTTGGACACTCTAACGGGCGAC |
| | | | | | ATTGA |
| 1462 | CLE3 | 12-13 | 96 | 291 | ATGGATTCGAAGAGTTTTCTGCTACTAC |
| | | | | | TACTACTCTTCTGCTTCTTGTTCCTTCAT |
| | | | | | GATGCTTCTGATCTCACTCAAGCTCATG |
| | | | | | CTCACGTTCAAGGACTTTCCAACCGCA |
| | | | | | AGATGATGATGATGAAAATGGAAAGTG |
| | | | | | AATGGGTTGGAGCAAATGGAGAAGCAG |
| | | | | | AGAAGGCAAAGACGAAGGGTTTAGGA |
| | | | | | CTACATGAAGAGTTAAGGACTGTTCCTT |
| | | | | | CGGGACCTGACCCGTTGCACCATCATG |
| | | | | | TGAACCCACCAAGACAGCCAAGAAACA |
| | | | | | ACTTTCAGCTCCCTTGA |
| 1463 | IDA- | 20 | 77 | 234 | ATGGCTCCGTGTCGTACGATGATGGTTC |
| | IDL | | | | TGCTCTGTTTTGTTCTGTTTCTCGCGGC |
| | | | | | GAGTAGTTCTTGTGTAGCGGCTGCAAG |
| | | | | | AATTGGAGCCACCATGGAGATGAAGAA |
| | | | | | GAATATAAAGAGATTAACGTTTAAAAA |
| | | | | | CAGCCATATTTTTGGTTACTTACCTAAA |
| | | | | | GGCGTTCCCATTCCTCCTTCTGCTCCTT |
| | | | | | CTAAGAGACACAACTCTTTTGTTAACTC |
| | | | | | TCTTCCTCATTGA |
| 1464 | PSK-α | 5 | 87 | 264 | ATGATGAAGACGAAAAGTGAAGTGTTG |
| | | | | | ATCTTTTTCTTCACTCTAGTATTGCTTTT |
| | | | | | AAGCATGGCTTCAAGTGTTATTTTAAGA |
| | | | | | GAAGATGGTTTTGCTCCTCCTAAACCAT |
| | | | | | CTCCCACCACACATGAGAAAGCAAGTA |
| | | | | | CTAAAGGTGACAGAGATGGAGTAGAGT |
| | | | | | GCAAGAATTCAGACAGTGAAGAAGAAT |
| | | | | | GTCTTGTGAAGAAAACAGTAGCTGCTC |
| | | | | | ACACCGATTACATCTATACACAAGATTT |
| | | | | | AAACCTATCTCCTTGA |
| 1465 | PSY1 | 16-18 | 75 | 228 | ATGACTTTTGTAGTTCGTCTTCTTGTGT |
| | | | | | GTCTCTTATTGACGCTTACAATTACATC |
| | | | | | TTCTCTAGCCCGCAACCCTGTTTCCGTT |
| | | | | | TCAGGTGGGTTTGAGAATTCTGGATTCC |
| | | | | | AAAGGAGTTTGTTGATGGTGAACGTTG |
| | | | | | AGGACTACGGTGACCCATCTGCAAATC |
| | | | | | CTAAGCACGACCCCGGCGTTCCTCCGTC |
| | | | | | AGCAACCGGCCAACGTGTCGTCGGCAG |
| | | | | | AGGCTGA |
| 1466 | RGF1 | 13 | 116 | 442 | AAAACACACAAGTTTACTCTTTTCTGTT |
| | | | | | CATATACGTACATCAAGCCAAGGAGAA |
| | | | | | AAAAGGAAGGCGAGATGGTGTCCATAA |
| | | | | | GGGTTATTTGCTATCTTTTAGTATTTTCC |
| | | | | | GTTTTGCAGGTGCATGCTAAAGTCTCCA |
| | | | | | ATGCAAACTTTAATAGCCAAGCTCCAC |
| | | | | | AAATGAAAAATAGTGAAGGTCTTGGAG |
| | | | | | CAAGCAATGGTACCCAAATTGCCAAGA |
| | | | | | AGCATGCTGAAGATGTAATTGAAAACC |
| | | | | | GAAAGACGTTGAAGCATGTAAATGTGA |
| | | | | | AGGTGGAGGCAAATGAGAAGAATGGTT |
| | | | | | TAGAAATAGAGAGTAAAGAAATGGTGA |
| | | | | | AGAAAAGAAAAAACAAGAAGAGACTC |
| | | | | | ACCAAGACGGAGAGTTTAACTGCCGAT |
| | | | | | TATAGCAACCCTGGTCATCATCCTCCTA |
| | | | | | GGCATAACTAAAACATATATATATATA |
| | | | | | TATATA |

### Host

[0084] In various embodiments, the cell is a plant cell. In some embodiments, the plant is a monocotyledonous plant. Non-limiting examples of the monocotyledonous plants are described in Table 9. In other embodiments, the plant is a dicotyledonous plant. Non-limiting examples of the dicotyledonous plant are described in Table 9.

TABLE 9
Non-limiting examples of monocotyledonous and dicotyledonous plants.
The first column (Monocot Plant) contains the binomial scientific
name of non-limiting examples of monocotyledonous plants that can
be modified (e.g., genetically edited) by the present platform.
The second column (Dicot Plant) contains the scientific name of
non-limiting examples of dicotyledonous plants that can be genetically
edited by the present modified by the present platform.

| Monocot Plant | Dicot Plant |
|---|---|
| Triticum aestivum | Arabidopsis lyrata |
| Triticum turgidum | Arabidopsis thaliana |
| Triticum dicoccoides | Capsella rubella |
| Aegilops tauschii | Cardamine hirsuta |
| Hordeum vulgare | Brassica carinata |
| Secale cereale | Brassica oleracea |
| Lolium perenne | Brassica rapa |
| Brachypodium distachyon | Brassica napus |
| Phyllostachys edulis | Schrenkiella parvula |
| Oryza alta | Eutrema salsugineum |
| Oryza sativa | Aethionema arabicum |
| Oryza brachyantha | Tarenaya hassleriana |
| Setaria italica | Carica papaya |
| Setaria viridis | Corchorus olitorius |
| Cenchrus purpureus | Theobroma cacao |
| Panicum hallii | Gossypium hirsutum |
| Digitaria exilis | Gossypium raimondii |
| Miscanthus sinensis | Durio zibethinus |
| Saccharum spontaneum | Acer truncatum |
| Sorghum bicolor | Citrus clementina |
| Zea mays | Eucalyptus grandis |
| Eragrostis curvula | Punica granatum |
| Oropetium thomaeum | Corylus avellana |
| Zoysia japonica ssp. nagirizaki | Carpinus fangiana |
| Ananas comosus | Carya illinoinensis |
| Musa acuminata | Quercus lobata |
| Calamus simplicifolius | Cucumis melo |
| Elaeis guineensis | Cucumis sativus L. |
| Asparagus officinalis | Citrullus lanatus |
| Allium sativum | Sechium edule |
| Vanilla planifolia | Fragaria × ananassa |
| Dioscorea dumetorum | Fragaria vesca |
| Spirodela polyrhiza | Rosa chinensis |
| Zostera marina | Malus domestica |
| | Prunus persica |
| | Cannabis sativa |
| | Medicago truncatula |
| | Trifolium pratense |
| | Pisum sativum |
| | Cicer arietinum L. |
| | Lotus japonicus |
| | Glycine max |
| | Phaseolus vulgaris |
| | Vigna mungo |
| | Lupinus albus |
| | Arachis hypogaea |
| | Manihot esculenta |
| | Sapria himalayana |
| | Populus trichocarpa |
| | Salix brachista |
| | Triptery gium wilfordii |
| | Vitis vinifera |
| | Rhododendron simsii |
| | Vaccinium macrocarpon |
| | Actinidia chinensis |
| | Camellia sinensis |
| | Davidia involucrata |
| | Hydrangea macrophylla |
| | Erythranthe guttata |
| | Striga asiatica |
| | Salvia bowleyana |
| | Utricularia gibba |
| | Avicennia marina |
| | Olea europaea |
| | Capsicum annuum |
| | Solanum lycopersicum |
| | Solanum pennellii |
| | Solanum tuberosum |
| | Nicotiana tabacum |
| | Petunia axillaris |
| | Coffea canephora |
| | Erigeron canadensis |
| | Helianthus annuus |
| | Lactuca sativa |
| | Daucus carota |
| | Lonicera japonica |
| | Beta vulgaris |
| | Chenopodium quinoa |
| | Amaranthus hybridus |
| | Selenicereus undatus |
| | Simmondsia chinensis |
| | Trochodendron aralioides |
| | Nelumbo nucifera |
| | Aquilegia oxysepala |
| | Papaver somniferum |
| | Ceratophyllum demersum |
| | Magnolia biondii |

[0085] In one aspect, the plant cell is a ground tissue cell. Examples of the tissue cell include, but not limited to, a parenchyma, collenchyma, and sclerenchyma cell. In another aspect, the plant cell is a vascular tissue cell. Examples of the vascular tissue cell include, but not limited to, a tracheid, vessel element, sieve tube cell, and companion cell. In yet another aspect, the plant cell is a dermal tissue cell. Examples of the dermal tissue cell include, but not limited to, an epidermal, guard cell, and trichome. In certain embodiments, the cell is not transgenic.

[0086] Also provided herein are seeds from the plant described herein. Further provided herein are plants obtained from the seed described herein.

[0087] In various embodiments, the plant has a trait. Examples of the trait include, but not limited to, hormonal regulation, protection against a pathogen, protection against an insect, nitrogen fixation, nutrient acquisition, immunity induction, biotic stress, and abiotic stress. In some embodiments, the trait is determined by regulatory nucleic acids or peptides for hormonal regulation, protection against a pathogen, protection against an insect, nitrogen fixation, nutrient acquisition, immunity induction, biotic stress, and abiotic stress.

[0088] In one aspect, the trait confers resistance to a pest and/or a disease caused by insects, microorganism and/or worms. Non-limiting examples of the pest are described in Table 6. In some embodiments, the resistance is due to antibiosis (growth and multiplication of the pest is inhibited), antixenosis (the pest is repelled by the plant), or tolerance (plant is able to withstand or recover from damage by the pest).

[0089] In another aspect, the trait confers resistance to a chemical. In some embodiments, the chemical is a weed control chemical. In a particular embodiment, the weed control chemical is a grown inhibitor. In other embodiments, the chemical is a herbicide. Examples of the herbicide include, but not limited to, 2,4-D (2,4-dichlorophenoxy acetic acid), Aminopyralid, Atrazine, Clopyralid, Dicamba, Glufosinate ammonium, Fluazifop, Fluroxypyr, Glyphosate, Imazapyr, Imazapic, Imazamox, Linuron, MCPA (2-methyl-4-chlorophenoxyacetic acid), Metolachlor, Paraquat, Pendimethalin, Picloram, Sodium chlorate, Triclopyr, Sulfonylureas (e.g., Flazasulfuron and Metsulfuron-methyl), and any other commercial herbicide.

[0090] In yet another aspect, the trait confers a nutritionally improved quality as compared to a plant that does not comprise the cell described herein. In some embodiments, the trait confers an increase in crop yield as compared to a plant that does not comprise the cell described herein. In some embodiments, the trait confers an ability to acquire nutrients more efficiently as compared to a plant that does not comprise the cells described herein. For example, the trait may increase the ability of the plant to acquire nutrients by at least 0.1 fold, 0.2 fold, 0.3 fold, 0.4 fold, 0.5 fold, 0.6 fold, 0.7 fold, 0.8 fold, 0.9 fold, 1.0 fold, 1.1 fold, 1.2 fold, 1.3 fold, 1.4 fold, 1.5 fold, 1.6 fold, 1.7 fold, 1.8 fold, 1.9 fold, 2.0 fold, 2.1 fold, 2.2 fold, 2.3 fold, 2.4 fold, 2.5 fold, 2.6 fold, 2.7 fold, 2.8 fold, 2.9 fold, 3.0 fold, 3.1 fold, 3.2 fold, 3.3 fold, 3.4 fold, 3.5 fold, 3.6 fold, 3.7 fold, 3.8 fold, 3.9 fold, 4.0 fold, 4.1 fold, 4.2 fold, 4.3 fold, 4.4 fold, 4.5 fold, 4.6 fold, 4.7 fold, 4.8 fold, 4.9 fold, 5.0 fold or more. In some embodiments, the trait confers an ability to acquire water more efficiently as compared to a plant that does not comprise the cells described herein. For example, the trait may increase the ability of the plant to acquire water by at least 0.1 fold, 0.2 fold, 0.3 fold, 0.4 fold, 0.5 fold, 0.6 fold, 0.7 fold, 0.8 fold, 0.9 fold, 1.0 fold, 1.1 fold, 1.2 fold, 1.3 fold, 1.4 fold, 1.5 fold, 1.6 fold, 1.7 fold, 1.8 fold, 1.9 fold, 2.0 fold, 2.1 fold, 2.2 fold, 2.3 fold, 2.4 fold, 2.5 fold, 2.6 fold, 2.7 fold, 2.8 fold, 2.9 fold, 3.0 fold, 3.1 fold, 3.2 fold, 3.3 fold, 3.4 fold, 3.5 fold, 3.6 fold, 3.7 fold, 3.8 fold, 3.9 fold, 4.0 fold, 4.1 fold, 4.2 fold, 4.3 fold, 4.4 fold, 4.5 fold, 4.6 fold, 4.7 fold, 4.8 fold, 4.9 fold, 5.0 fold or more. In some embodiments, the trait confers improved photosynthetic efficiency as compared to a plant that does not comprise the cells described herein. For example, the trait may increase photosynthetic efficiency of the plant by at least 0.1 fold, 0.2 fold, 0.3 fold, 0.4 fold, 0.5 fold, 0.6 fold, 0.7 fold, 0.8 fold, 0.9 fold, 1.0 fold, 1.1 fold, 1.2 fold, 1.3 fold, 1.4 fold, 1.5 fold, 1.6 fold, 1.7 fold, 1.8 fold, 1.9 fold, 2.0 fold, 2.1 fold, 2.2 fold, 2.3 fold, 2.4 fold, 2.5 fold, 2.6 fold, 2.7 fold, 2.8 fold, 2.9 fold, 3.0 fold, 3.1 fold, 3.2 fold, 3.3 fold, 3.4 fold, 3.5 fold, 3.6 fold, 3.7 fold, 3.8 fold, 3.9 fold, 4.0 fold, 4.1 fold, 4.2 fold, 4.3 fold, 4.4 fold, 4.5 fold, 4.6 fold, 4.7 fold, 4.8 fold, 4.9 fold, 5.0 fold or more.

### Delivery Construct

[0091] Provided herein, in certain embodiments, is a first element comprising a donor nucleic acid sequence (e.g., donor DNA). As shown in FIG. 5, the donor nucleic acid (e.g., donor DNA) may be A) a blunt single-stranded oligodeoxynucleotide (ssODN), B) a blunt linear double-stranded oligodeoxynucleotide (dsODN), or C) a chemically modified dsODN (dsODN-CM) which is flanked by two additional nucleotides with phosphorothioate linkages (asterisk) at the 5′- and 3′-ends of both DNA strands. The dsODN-CM also contain a phosphorylation (bolded P) at the 5′ end of both strand of the exogenous nucleic acid. D) The donor DNA can also be delivered as a plasmid (plasmid donor), containing two equal sites for nuclease cleavage (S1) within a guide sequence, bearing the exogenous nucleic acid sequence, wherein the guide sequence is the same guide sequence of the non-coding region, intron. E) The plasmid donor cleaved by nuclease at S1 sites, releases the donor fragment of exogenous nucleic acid.

[0092] Also provided herein is a second element (e.g., plasmid) comprising a sequence encoding a DNA nuclease. In some embodiments, the DNA nuclease is a CRISPR associated nuclease. In a particular embodiment, the CRISPR associated nuclease comprises Cas9. In some embodiments, the second plasmid encodes one or more guide RNA (gRNA). Non-limiting examples of gRNA are described in Table 4. In other embodiments, the DNA nuclease is a Transcription Activator-Like Effector Nuclease (TALEN). In certain embodiments, the sequence encoding the DNA nuclease is fused to a sequence encoding VirD2 as described in Table 5.

[0093] Further provided herein is a kit that comprises the first element (e.g., donor plasmid) described herein and the second element (e.g., plasmid) comprising a sequence encoding a DNA nuclease described herein.

[0094] Further provided are combinations comprising the first element and optionally the second element, and a cell for insertion of the donor nucleic acid. In some embodiments, the cell comprises an acceptor non-coding region, for example an intron, for insertion of the donor nucleic acid sequence. In some embodiments, the cell is a plant cell. In some embodiments, the plant is a dicotyledonous plant. In some embodiments, the dicotyledonous plant is selected from Table 9. In some embodiments, the plant is a monocotyledonous plant. In some embodiments, the monocotyledonous plant is selected from Table 9. In some embodiments, the plant cell is a ground tissue cell. In some embodiments, the tissue cell is a parenchyma, collenchyma, or sclerenchyma cell. In some embodiments, the plant cell is a vascular tissue cell. In some embodiments, the tissue cell is a tracheid, vessel element, sieve tube cell, or companion cell. In some embodiments, the plant cell is a dermal tissue cell. In some embodiments, the tissue cell is an epidermal, guard cell, or trichome. In some embodiments, the cell is not transgenic. In some embodiments, the exogenous nucleic acid is introduced into the cell via non-homologous recombination. In some embodiments, the exogenous nucleic acid is introduced into the cell via non-homologous end-joining. In some embodiments, the exogenous nucleic acid is introduced into the cell via homology-independent targeted integration (HITI). In some embodiments, the exogenous nucleic acid is introduced into the cell via nuclease gene editing. In some embodiments, the nuclease gene editing comprises CRISPR-Cas gene editing.

### Methods of Preparing Compositions

[0095] Various embodiments provide for methods of generating a cell comprising an exogenous nucleic acid described herein. In some embodiments, the method comprises introducing into a non-coding region, e.g., an intron, 5′ non-coding or 3′ non-coding region, of the cell the endogenous or exogenous nucleic acid.

[0096] Provided herein, in some embodiments, are methods of generating a cell comprising an endogenous or exogenous nucleic acid in a non-coding region, e.g., an intron, of the cell. In some embodiments, the method comprises introducing into the cell the donor nucleic acid (e.g., donor DNA) described herein.

[0097] Also provided herein, in some embodiments, are methods of generating a host comprising an endogenous or exogenous nucleic acid. In some embodiments, the method comprises introducing into a non-coding region, e.g., intron, of the host the endogenous or exogenous nucleic acid.

[0098] Further provided herein, in some embodiments, are methods of generating a host comprising an endogenous or exogenous nucleic acid in a non-coding region, e.g., an intron, of the host. In some embodiments, the method comprises introducing into the host the donor nucleic acid (e.g., donor DNA) described herein.

[0099] In various embodiments, insertion of endogenous or the exogenous nucleic acid may be done by non-homologous insertion into a non-coding region, e.g., intron, via nuclease gene editing or any other gene editing method that does not require homologous recombination. Therefore, the modified cells are not transgenic. For example, a precise nuclease mediated integration into the non-coding region, e.g., intron, of the genes may be performed by using the homology-independent targeted integration (HITI), which explores the DNA repair system directed by non-homologous end joining (NHEJ).

[0100] In some embodiments, the endogenous or exogenous nucleic acid is introduced via non-homologous recombination. In some embodiments, the endogenous or exogenous nucleic acid is introduced via non-homologous end-joining. In some embodiments, the endogenous or exogenous nucleic acid is introduced via homology-independent targeted integration (HITI). In some embodiments, the endogenous or exogenous nucleic acid is introduced cell via nuclease gene editing. In a particular embodiment, the nuclease gene editing comprises CRISPR-Cas gene editing.

### Methods of Use

[0101] Provided herein, in some embodiments, are methods of reducing or eliminating expression of a target gene in a cell. In some embodiments, the method comprises introducing into a non-coding region, e.g., an intron, of the cell an endogenous or exogenous nucleic acid. In certain embodiments, the endogenous or exogenous nucleic acid encodes for a sequence that is capable of binding to mRNA of the target gene, thereby reducing or eliminating expression of the target gene.

[0102] Provided herein, in some embodiments, are methods of introducing, increasing, or reducing a trait in a host. In some embodiments, the method comprises introducing into a non-coding region, e.g., an intron, of a cell of the host an endogenous or exogenous nucleic acid. In certain embodiments, the endogenous or exogenous nucleic acid encodes for a sequence that is capable of binding to mRNA of the target gene, thereby introducing, increasing, or reducing a trait in a host.

[0103] Provided herein, in some embodiments, are methods of regulating a target gene or peptide in a cell. In some embodiments, the method comprises introducing into a non-coding region, e.g., an intron, of a cell of the host an endogenous or exogenous nucleic acid. In certain embodiments, the endogenous or exogenous nucleic acid encodes for a sequence that is capable of binding to mRNA of the target gene, thereby regulating a target gene or peptide in a cell.

[0104] Provided herein, in some embodiments, are methods of introducing, increasing, or reducing a trait in a host. In some embodiments, the method comprises introducing into a non-coding region, e.g., an intron, of a cell of the host an endogenous or exogenous nucleic acid. In certain embodiments, the endogenous or exogenous nucleic acid encodes for a sequence that is capable of binding to mRNA of the target gene, thereby introducing, increasing, or reducing a trait in a host.

### Kits

[0105] Further provided is a kit to perform methods described herein. The kit is an assemblage of components, including at least one of the compositions described herein. Thus, in some embodiments, the kit comprises a nucleic acid and/or peptide composition described herein. The nucleic acid or peptide may be combined with, or complexed to, another component, such as a vehicle for delivery, or may be unmodified for direct delivery.

[0106] Instructions for use of the components may be included in the kit. Optionally, the kit also contains other useful components, such as, diluents, buffers, pharmaceutically acceptable carriers, syringes, applicators, measuring tools, bandaging materials or other useful paraphernalia as will be readily recognized by those of skill in the art.

[0107] The materials or components assembled in the kit can be provided to the practitioner stored in any convenient and suitable ways that preserve their operability and utility. For example, the components can be in dissolved, dehydrated, or lyophilized form; they can be provided at room, refrigerated or frozen temperatures. The components are typically contained in suitable packaging material(s). As employed herein, the phrase “packaging material” refers to one or more physical structures used to house the contents of the kit, such as inventive compositions and the like. The packaging material is constructed by well-known methods, preferably to provide a sterile, contaminant-free environment. The packaging materials employed in the kit are those customarily utilized in gene expression assays and in the administration of treatments. As used herein, the term “package” refers to a suitable solid matrix or material such as glass, plastic, paper, foil, and the like, capable of holding the individual kit components. Thus, for example, a package can be a glass vial or prefilled syringes used to contain suitable quantities of a composition containing a nucleic acid herein. The packaging material generally has an external label which indicates the contents and/or purpose of the kit and/or its components.

### Certain Definitions

[0108] Percent (%) sequence identity with respect to a reference polypeptide or polynucleotide sequence is the percentage of amino acid or nucleotide residues in a candidate sequence that are identical with the amino acid or nucleotide residues in the reference polypeptide or polynucleotide sequence after aligning the sequences and introducing gaps, if necessary, to achieve the maximum percent sequence identity, and not considering any conservative substitutions as part of the sequence identity. Alignment for purposes of determining percent amino acid sequence identity can be achieved in various ways that are known, for instance, using publicly available computer software such as BLAST, BLAST-2, ALIGN or Megalign (DNASTAR) software. Appropriate parameters for aligning sequences can be determined, including algorithms needed to achieve maximal alignment over the full length of the sequences being compared. For purposes herein, however, % amino acid or polynucleotide sequence identity values are generated using the sequence comparison computer program ALIGN-2. The ALIGN-2 sequence comparison computer program was authored by Genentech, Inc., and the source code has been filed with user documentation in the U.S. Copyright Office, Washington D.C., 20559, where it is registered under U.S. Copyright Registration No. TXU510087. The ALIGN-2 program is publicly available from Genentech, Inc., South San Francisco, Calif., or may be compiled from the source code. The ALIGN-2 program should be compiled for use on a UNIX operating system, including digital UNIX V4.0D. All sequence comparison parameters are set by the ALIGN-2 program and do not vary.

[0109] In situations where ALIGN-2 is employed for amino acid or polynucleotide sequence comparisons, the % amino acid or polynucleotide sequence identity of a given sequence A to, with, or against a given sequence B (which can alternatively be phrased as a given sequence A that has or comprises a certain % sequence identity to, with, or against a given sequence B is calculated as follows: 100 times the fraction X/Y, where X is the number of residues scored as identical matches by the sequence alignment program ALIGN-2 in that program's alignment of A and B, and where Y is the total number of residues in B. It will be appreciated that where the length of sequence A is not equal to the length of sequence B, the % sequence identity of A to B will not equal the % sequence identity of B to A. Unless specifically stated otherwise, all % sequence identity values used herein are obtained as described in the immediately preceding paragraph using the ALIGN-2 computer program.

[0110] In some embodiments, the term “about” means within 10% of the stated amount. For instance, a peptide comprising about 80% identity to a reference peptide may comprise 72% to 88% identity to the reference peptide sequence.

### NON-LIMITING EXAMPLE EMBODIMENTS

[0111] 1. A cell comprising a non-coding region, wherein the non-coding region comprises an endogenous or exogenous nucleic acid, optionally, wherein the non-coding region comprises (i) a modified intron region positioned between a first exon region and a second exon region, (ii) a 5′ non-coding region, or (iii) a 3′ non-coding region, or (iv) at least two of (i)-(iii). 2. The cell of embodiment 1, wherein the non-coding region is modified from an intron of a gene. 3. The cell of embodiment 2, wherein the gene is endogenous to the cell. 4. The cell of embodiment 2 or embodiment 3, wherein the endogenous or exogenous nucleic acid is positioned within the non-coding region of the gene, or within a portion of the non-coding region of the gene. 5. The cell of any one of embodiments 2-4, wherein the endogenous or exogenous nucleic acid does not replace any nucleobases of the non-coding region of the gene. 6. The cell of any one of embodiments 2-4, wherein the endogenous or exogenous nucleic acid replaces 1-10, 1-20, 10-30, or 10-40 nucleobases of the non-coding region of the gene. 7. The cell of any one of embodiments 2-6, wherein the non-coding region comprises a first portion of the intron of the gene, the endogenous or exogenous nucleic acid, and a second portion of the intron of the gene. 8. The cell of any one of embodiments 2-7, wherein the intron of the gene is selected from Table 2. 9. The cell of any one of embodiments 2-8, wherein the gene is selected from Table 1. 10. The cell of any one of embodiments 2-9, wherein the gene comprises a plurality of introns. 11. The cell of embodiment 10, wherein the plurality of introns is about 2, 3, 4, 5, 6, 7, 8, 9, 10, 11, 12, 13, 14, 15, 16, 17, 18, 19, 20 introns (e.g., as exemplified by genes from Table 1). 12. The cell of embodiment 11, wherein the non-coding region is present in the first, second, third, fourth, fifth, sixth, seventh, eighth, nineth, tenth, eleventh, twelfth, thirteenth, fourteenth, fifteenth, sixteenth, seventeenth, eighteenth, nineteenth, or twentieth intron of the gene, as applicable. 13. The cell of any one of embodiments 2-12, wherein the first exon region and the second exon region are regions of the gene. 14. The cell of embodiment 1, wherein (i) the non-coding region comprises the modified intron region positioned between the first exon region and the second exon region, and wherein the first exon region and the second exon region are regions of a gene, (ii) the non-coding region comprises the 5′ non-coding region, and the 5′ non-coding region is upstream of a gene, or (iii) the non-coding region comprises the 3′ non-coding region, and the 3′ non-coding region is downstream of a gene. 15. The cell of embodiment 14 or any one of embodiments 303-305, wherein the gene is endogenous to the cell. 16. The cell of any one of embodiments 2-15, wherein the gene is constitutively expressed. 17. The cell of any one of embodiments 2-16, wherein the gene is expressed in a specific tissue or organ. 18. The cell of embodiment 17, wherein the cell is a plant cell, and the tissue or organ comprises a root, stem, fruit, seed, leaf, ground tissue, vascular tissue, or dermal tissue, or a combination of two or more thereof. 19. The cell of any one of embodiments 2-18, wherein the gene is expressed at a range of 1-5%, 1-10%, 5-15%, or 5-20% of the total expressed genes in the cell (e.g., as determined by mRNA expression profiling of the said cell). 20. The cell of any one of embodiments 2-19, wherein upon transcription and mRNA splicing, the native mRNA of the gene is translated into the native protein of the gene. 21. The cell of any one of embodiments 2-20, wherein the gene encodes a native protein. 22. The cell of embodiment 20 or embodiment 21, wherein the native protein is actin, ubiquitin, ribosomal protein, heat shock protein, rubisco, tubulin, TMM, FAMA, rbc-S, CAB2, Rac, GLP, PDX1, BiGSSP, Lhca3, SMB, GATA23, ARF, SIREO, Prx, TIP2, ET304, RB7, or any other protein expressed from a gene of Table 1. 23. The cell of any one of embodiments 2-22, wherein the gene is selected from Table 1. 24. The cell of any one of embodiments 2-23, wherein the exogenous nucleic acid is transcribed from a promoter. 25. The cell of embodiment 24, wherein the promoter is a promoter native to the gene. 26. The cell of embodiment 1, wherein the endogenous or exogenous nucleic acid is transcribed from a promoter. 27. The cell of any one of embodiments 24-26, wherein the promoter is a constitutive promoter. 28. The cell of any one of embodiments 24-27, wherein the promoter is specific for a plant organ. 29. The cell of embodiment 28, wherein the plant organ is a root, stem, fruit, seed, or leaf. 30. The cell of any one of embodiments 24-29, wherein the promoter is specific for a plant tissue. 31. The cell of embodiment 30, wherein the plant tissue is a ground tissue, vascular tissue, or dermal tissue. 32. The cell of any one of embodiments 24-31, wherein the promoter is an endogenous promoter of the cell. 33. The cell of any one of embodiments 24-32, wherein the promoter drives the expression of one gene selected from Table 1. 34. The cell of any one of embodiments 1-33, wherein the non-coding region comprises one or more nucleases recognition sites. 35. The cell of embodiment 34, wherein at least one of the one or more nuclease recognition sites is selected from Table 3. 36. The cell of any one of embodiments 1-35, wherein the endogenous or exogenous nucleic acid is about 10 to about 700 bases in length, 10 to about 600 bases in length, 10 to about 500 bases in length, 10 to about 400 bases in length, 10 to about 300 bases in length, 10 to about 200 bases in length, 10 to about 180 bases, about 10 to about 160 bases, about 10 to about 140 bases, about 10 to about 120 bases, about 10 to about 110 bases, or about 10 to about 100 bases in length. 37. The cell of any one of embodiments 1-36, wherein the endogenous or exogenous nucleic acid is less than 200 bases in length. 38. The cell of any one of embodiments 1-37, wherein the endogenous or exogenous nucleic acid is positioned within the genome of the cell. 39. The cell of any one of embodiments 1-38, wherein the endogenous or exogenous nucleic acid is not present on a plasmid. 40. The cell of any one of embodiments 1-39, wherein the endogenous or exogenous nucleic acid encodes a micro RNA (miRNA). 41. The cell of embodiment 40, wherein the miRNA is expressed as a short tandem target mimic (STTM) comprising two copies of partially complementary RNA linked by a spacer. 42. The cell of embodiment 41, wherein the spacer has a length of about 6 to about 60 nucleobases. 43. The cell of embodiment 41 or embodiment 42, wherein each of the two copies of partially complementary RNA have a length of about 10 to about 30 nucleobases. 44. The cell of any one of embodiments 40-43, wherein the miRNA specifically binds to a target nucleic acid. 45. The cell of embodiment 44, wherein the target nucleic acid is exogenous to the cell. 46. The cell of embodiment 44, wherein the target nucleic acid is endogenous to the cell. 47. The cell of any one of embodiments 44-46, wherein the target nucleic acid is responsible for water acquisition, nutrient acquisition, disease control, or pest control, or any combination thereof. 48. The cell of any one of embodiments 44-47, wherein the target nucleic acid comprises a regulatory element involved in: plant growth and development, yield, biotic stress, abiotic stress, or herbicide resistance, or any combination thereof. 49. The cell of any one of embodiments 44-48, wherein the target nucleic acid is from an insect, bacteria, fungi, worm (e.g., larva of the insect, and nematode), or a combination thereof, that is harmful to the cell. 50. The cell of any one of embodiments 44-49, wherein the target nucleic acid is present in a target pest selected from Table 6. 51. The cell of any one of embodiments 44-50, wherein the target nucleic acid is selected from the target genes in Table 6. 52. The cell of any one of embodiments 44-51, wherein the target nucleic acid is from an organism that causes a disease to the cell. 53. The cell of embodiment 52, wherein the organism is any one selected from Table 6. 54. The cell of any one of embodiments 44-53, wherein the target nucleic acid is a target mRNA. 55. The cell of embodiment 54, wherein the target mRNA comprises a sequence at least 70% identical to a sequence of Table 6. 56. The cell of embodiment 54 or embodiment 55, wherein the target mRNA is encoded from a target gene. 57. The cell of embodiment 56, wherein the target gene is selected from a gene of Table 6. 58. The cell of embodiment 56 or embodiment 57, wherein the target gene comprises a sequence at least 70% identical to a sequence of Table 6. 59. The cell of any one of embodiments 1-58, wherein the exogenous nucleic acid comprises a sequence at least 70% identical to a sequence of any one of the target gene sequences of Table 6, or the exogenous nucleic acid comprises a sequence at least 80% identical to at least 10 contiguous bases of any one of the target gene sequences of Table 6. 60. The cell of any one of embodiments 1-59, wherein the exogenous nucleic acid encodes a peptide. 61. The cell of embodiment 60, wherein the coding region for the peptide is flanked by a 5′ribosomal binding site (RBS). 62. The cell of embodiment 61, wherein the RBS is 4-80 bases in length. 63. The cell of any one of embodiments 60-62, wherein the peptide affects one or more property of the cell selected from: hormonal regulation, protection against a pathogen, protection against an insect, nitrogen fixation, nutrient acquisition, immunity induction, biotic stress, or abiotic stress, or a combination thereof. 64. The cell of any one of embodiments 60-63, wherein the peptide is 2-80 amino acids in length, 3-80, 4-80, 5-80, 6-80, 7-80, 8-80, 9-80, 10-80, 20-80, 30-80, 40-80, 50-80, 60-80, 70-80 or 1-80 amino acids in length. 65. The cell of any one of embodiments 60-64, wherein the peptide is selected from Table 7. 66. The cell of any one of embodiments 60-65, wherein the peptide is encoded by a sequence at least 80% identical to a sequence of Table 8. 67. The cell of any one of embodiments 1-66, wherein the exogenous nucleic acid comprises a sequence at least 80% identical to a sequence of Table 8.

[0112] 68. A cell comprising an endogenous or exogenous micro RNA (miRNA). 69. The cell of embodiment 68, wherein the exogenous miRNA is an artificial micro RNA (amiRNA). 70. The cell of embodiment 68 or embodiment 69, wherein the endogenous or exogenous miRNA is expressed as a short tandem target mimic (STTM) comprising two copies of partially complementary RNA linked by a spacer. 71. The cell of embodiment 70, wherein the spacer has a length of about 6 to about 60 nucleobases. 72. The cell of embodiment 70 or embodiment 71, wherein each of the two copies of partially complementary RNA have a length of about 10 to about 30 nucleobases. 73. The cell of any one of embodiments 68-72, wherein the endogenous or exogenous miRNA is a precursor miRNA. 74. The cell of any one of embodiments 68-72, wherein the endogenous or exogenous miRNA is a mature miRNA. 75. The cell of embodiment 74, wherein the mature miRNA comprises about 21-22 nucleotides. 76. The cell of any one of embodiments 68-75, wherein the miRNA specifically binds to a target nucleic acid. 77. The cell of embodiment 76, wherein the target nucleic acid is exogenous to the cell. 78. The cell of embodiment 76, wherein the target nucleic acid is endogenous to the cell. 79. The cell of any one of embodiments 76-78, wherein the target nucleic acid is responsible for water acquisition, nutrient acquisition, disease control, or pest control, or any combination thereof. 80. The cell of any one of embodiments 76-79, wherein the target nucleic acid comprises a regulatory element involved in: plant growth and development, yield, biotic stress, abiotic stress, or herbicide resistance, or any combination thereof. 81. The cell of any one of embodiments 76-80, wherein the target nucleic acid is from an insect, bacteria, fungi, nematode or a worm, or a combination thereof, that is harmful to the cell. 82. The cell of any one of embodiments 76-81, wherein the target nucleic acid is present in a target pest selected from Table 6. 83. The cell of any one of embodiments 76-82, wherein the target nucleic acid is selected from the target genes in Table 6. 84. The cell of any one of embodiments 76-83, wherein the target nucleic acid is from an organism that causes a disease to the cell. 85. The cell of embodiment 84, wherein the organism is any one selected from Table 6. 86. The cell of any one of embodiments 76-85, wherein the target nucleic acid is a target mRNA. 87. The cell of embodiment 86, wherein the target mRNA comprises a sequence at least 70% identical to a sequence of Table 6. 88. The cell of embodiment 86 or embodiment 87, wherein the target mRNA is encoded from a target gene. 89. The cell of embodiment 88, wherein the target gene is selected from a gene of Table 6. 90. The cell of embodiment 88 or embodiment 89, wherein the target gene comprises a sequence at least 70% identical to a sequence of Table 6.

[0113] 91. A cell comprising an endogenous or exogenous mRNA encoding a peptide. 92. The cell of embodiment 91, wherein the endogenous or exogenous mRNA is flanked by a 5′ribosomal binding site (RBS). 93. The cell of embodiment 92, wherein the RBS is 4-20 base pair in length. 94. The cell of any one of embodiments 91-93, wherein the peptide affects one or more property of the cell selected from: hormonal regulation, protection against a pathogen, protection against an insect, nitrogen fixation, nutrient acquisition, immunity induction, biotic stress, or abiotic stress, or a combination thereof. 95. The cell of any one of embodiments 91-94, wherein the peptide is 2-80 amino acids in length, 3-80, 4-80, 5-80, 6-80, 7-80, 8-80, 9-80, 10-80, 20-80, 30-80, 40-80, 50-80, 60-80, 70-80 or 1-80 amino acids in length. 96. The cell of any one of embodiments 91-95, wherein the peptide is selected from Table 7. 97. The cell of any one of embodiments 91-96, wherein the peptide is encoded by a sequence at least 80% identical to a sequence of Table 8. 98. The cell of any one of embodiments 91-97, wherein the mRNA comprises a sequence at least 80% identical to a sequence of Table 8.

[0114] 99. A cell comprising an endogenous or exogenous peptide. 100. The cell of embodiment 99, wherein the peptide affects one or more property of the cell selected from: hormonal regulation, protection against a pathogen, protection against an insect, nitrogen fixation, nutrient acquisition, immunity induction, biotic stress, or abiotic stress, or a combination thereof. 101. The cell of embodiment 99 or embodiment 100, wherein the peptide is 2-80 amino acids in length, 3-80, 4-80, 5-80, 6-80, 7-80, 8-80, 9-80, 10-80, 20-80, 30-80, 40-80, 50-80, 60-80, 70-80 or 1-80 amino acids in length. 102. The cell of any one of embodiments 99-101, wherein the peptide is selected from Table 7. 103. The cell of any one of embodiments 99-102, wherein the peptide is encoded by a sequence at least 80% identical to a sequence of Table 8. 104. The cell of any one of embodiments 1-103, wherein the cell is a plant cell. 105. The cell of embodiment 104, wherein the plant is a dicotyledonous plant. 106. The cell of embodiment 105, wherein the dicotyledonous plant is selected from Table 9. 107. The cell of embodiment 104, wherein the plant is a monocotyledonous plant. 108. The cell of embodiment 107, wherein the monocotyledonous plant is selected from Table 9. 109. The cell of any one of embodiments 104-108, wherein the plant cell is a ground tissue cell. 110. The cell of embodiment 109, wherein the tissue cell is a parenchyma, collenchyma, or sclerenchyma cell. 111. The cell of any one of embodiments 104-108, wherein the plant cell is a vascular tissue cell. 112. The cell of embodiment 111, wherein the tissue cell is a tracheid, vessel element, sieve tube cell, or companion cell. 113. The cell of any one of embodiments 104-108, wherein the plant cell is a dermal tissue cell. 114. The cell of embodiment 113, wherein the tissue cell is a epidermal, guard cell, or trichome.

[0115] 115. The cell of any one of embodiments 1-114, wherein the cell is not transgenic. 116. The cell of any one of embodiments 1-67 or embodiments 104-115, wherein the endogenous or exogenous nucleic acid is introduced into the cell via non-homologous recombination. 117. The cell of embodiment 116, wherein the endogenous or exogenous nucleic acid is introduced into the cell via non-homologous end-joining. 118. The cell of embodiment 116 or embodiment 117, wherein the endogenous or exogenous nucleic acid is introduced into the cell via homology-independent targeted integration (HITI). 119. The cell of any one of embodiments 1-67 or embodiments 104-118, wherein the endogenous or exogenous nucleic acid is introduced into the cell via nuclease gene editing. 120. The cell of embodiment 119, wherein the nuclease gene editing comprises CRISPR-Cas gene editing.

[0116] 121. A host comprising the cell of any one of embodiments 1-120. 122. The host of embodiment 121, wherein the host is a plant. 123. The host of embodiment 122, wherein the plant is a dicotyledonous plant. 124. The host of embodiment 123, wherein the dicotyledonous plant is selected from Table 9. 125. The host of embodiment 122, wherein the plant is a monocotyledonous plant. 126. The host of embodiment 125, wherein the monocotyledonous plant is selected from Table 9. 127. The host of any one of embodiments 122-126, wherein the plant is not transgenic.

[0117] 128. A seed from the plant of any one of embodiments 122-127.

[0118] 129. A plant obtained from the seed of embodiment 128. 130. The plant of any one of embodiments 122-127 or embodiment 129, wherein the plant has one or more traits. 131. The plant of embodiment 130, wherein the one or more traits comprises hormonal regulation, protection against a pathogen, protection against an insect, nitrogen fixation, nutrient acquisition, immunity induction, biotic stress, or abiotic stress, or a combination thereof. 132. The plant of embodiment 130 or embodiment 131, wherein the trait is conferred by an endogenous or exogenous nucleic acid and/or peptide. 133. The plant of embodiment 132, wherein the endogenous or exogenous nucleic acid and/or peptide provides hormonal regulation, protection against a pathogen, protection against an insect, nitrogen fixation, nutrient acquisition, immunity induction, biotic stress, or abiotic stress, or a combination thereof. 134. The plant of any one of embodiments 130-133, wherein the trait comprises resistance to a pest. 135. The plant of embodiment 134, wherein the pest is an insect, bacteria, fungi, worm (e.g., larva of the insect, and nematode), or a combination thereof. 136. The plant of embodiment 134 or embodiment 135, wherein the pest is selected from Table 6. 137. The plant of any one of embodiments 134-136, wherein the resistance is due to antibiosis (growth and multiplication of the pest is inhibited), antixenosis (the pest is repelled by the plant), or tolerance (plant is able to withstand or recover from damage by the pest). 138. The plant of any one of embodiments 134-137, wherein the resistant plant has a superior yield as compared to a plant that does not comprise the cell of any one of embodiments 1-120, when the plants are both under attack by the pest. 139. The plant of any one of embodiments 130-138, wherein the trait comprises resistance to a disease. 140. The plant of embodiment 139, wherein the disease is caused by a pest. 141. The plant of embodiment 140, wherein the pest is an insect, bacteria, fungi, worm (e.g., larva of the insect, and nematode), or a combination thereof. 142. The plant of embodiment 140 or embodiment 141, wherein the pest is selected from Table 6. 143. The plant of any one of embodiments 139-142, wherein the resistance is due to antibiosis (growth and multiplication of the pest is inhibited), antixenosis (the pest is repelled by the plant), or tolerance (plant is able to withstand or recover from damage by the pest). 144. The plant of any one of embodiments 139-143, wherein the resistant plant has a superior yield as compared to a plant that does not comprise the cell of any one of embodiments 1-120, when the plants are both exposed to the disease. 145. The plant of any one of embodiments 130-144, wherein the trait comprises resistance to a chemical. 146. The plant of embodiment 145, wherein the chemical is a weed control chemical. 147. The plant of embodiment 145, wherein the weed control chemical is a growth inhibitor. 148. The plant of embodiment 145, wherein the chemical is a herbicide. 149. The plant of embodiment 148, wherein the herbicide is 2,4-D (2,4-dichlorophenoxy acetic acid), Aminopyralid, Atrazine, Clopyralid, Dicamba, Glufosinate ammonium, Fluazifop, Fluroxypyr, Glyphosate, Imazapyr, Imazapic, Imazamox, Linuron, MCPA (2-methyl-4-chlorophenoxyacetic acid), Metolachlor, Paraquat, Pendimethalin, Picloram, Sodium chlorate, Triclopyr, Sulfonylureas (e.g., Flazasulfuron and Metsulfuron-methyl), or a combination thereof. 150. The plant of any one of embodiments 130-149, wherein the trait confers an improved nutritional and/or visual quality as compared to a plant that does not comprise the cell of any one of embodiments 1-120, (e.g., measurable using a spectrometric method). 151. The plant of any one of embodiments 130-150, wherein the trait confers an increase in crop yield as compared to a plant that does not comprise the cell of any one of embodiments 1-120. 152. The plant of any one of embodiments 130-151, wherein the trait confers an ability to acquire a nutrient (e.g., nitrogen, phosphorus, potassium and/or plant micronutrients) at least 10% more efficiently as compared to a plant that does not comprise the cell of any one of embodiments 1-120 (e.g., measurable using a spectrophotometric method). 153. The plant of any one of embodiments 130-152, wherein the trait confers an ability to acquire water at least 10% more efficiently as compared to a plant that does not comprise the cell of any one of embodiments 1-120 (e.g., measurable using the plant fresh weight when they were subjected to, for example, drought stress). 154. The plant of any one of embodiments 130-153, wherein the trait confers at least 10% improved photosynthetic efficiency as compared to a plant that does not comprise the cell of any one of embodiments 1-120 (e.g., measurable using, for example, a gas-exchange analyzer).

[0119] 155. A donor nucleic acid sequence comprising an endogenous or exogenous nucleic acid. 156. The donor nucleic acid of embodiment 155, wherein the endogenous or exogenous nucleic acid is about 10 to about 700 bases in length, about 10 to about 600 bases in length, about 10 to about 500 bases in length, about 10 to about 400 bases in length, about 10 to about 300 bases in length, about 10 to about 200 bases in length, about 10 to about 180 bases, about 10 to about 160 bases, about 10 to about 140 bases, about 10 to about 120 bases, about 10 to about 110 bases, or about 10 to about 100 bases in length. 157. The donor nucleic acid of embodiment 155 or embodiment 156, wherein the endogenous or exogenous nucleic acid is less than 200 bases in length. 158. The donor nucleic acid of any one of embodiments 155-157, wherein the endogenous or exogenous nucleic acid encodes a micro RNA (miRNA). 159. The donor nucleic acid of embodiment 158, wherein the miRNA is expressed as a short tandem target mimic (STTM) comprising two copies of partially complementary RNA linked by a spacer. 160. The donor nucleic acid of embodiment 159, wherein the spacer has a length of about 6 to about 60 nucleobases. 161. The donor nucleic acid of embodiment 159 or embodiment 160, wherein each of the two copies of partially complementary RNA have a length of about 10 to about 30 nucleobases. 162. The donor nucleic acid of any one of embodiments 158-161, wherein the miRNA specifically binds to a target nucleic acid. 163. The donor nucleic acid of embodiment 162, wherein the target nucleic acid is responsible for water acquisition, nutrient acquisition, disease control, or pest control, or any combination thereof. 164. The donor nucleic acid of embodiment 162 or embodiment 163, wherein the target nucleic acid comprises a regulatory element involved in: plant growth and development, yield, biotic stress, abiotic stress, or herbicide resistance, or any combination thereof. 165. The donor nucleic acid of any one of embodiments 162-164, wherein the target nucleic acid is from an insect, bacteria, fungi, worm (e.g., larva of the insect, and nematode), or a combination thereof, that is harmful to a cell. 166. The donor nucleic acid of any one of embodiments 162-165, wherein the target nucleic acid is present in a target pest selected from Table 6. 167. The donor nucleic acid of any one of embodiments 162-166, wherein the target nucleic acid is selected from the target genes in Table 6. 168. The donor nucleic acid of any one of embodiments 162-167, wherein the target nucleic acid is from an organism that causes a disease to a cell. 169. The donor nucleic acid of embodiment 168, wherein the organism is any one selected from Table 6. 170. The donor nucleic acid of any one of embodiments 162-169, wherein the target nucleic acid is a target mRNA. 171. The donor nucleic acid of embodiment 170, wherein the target mRNA comprises a sequence at least 70% identical to a sequence of Table 6. 172. The donor nucleic acid of embodiment 170 or embodiment 171, wherein the target mRNA is encoded from a target gene. 173. The donor nucleic acid of embodiment 172, wherein the target gene is selected from a gene of Table 6. 174. The donor nucleic acid of embodiment 172 or embodiment 173, wherein the target gene comprises a sequence at least 70% identical to a sequence of Table 6. 175. The donor nucleic acid of any one of embodiments 155-174, wherein the endogenous or exogenous nucleic acid comprises a sequence at least 70% identical to a sequence of any one of the target gene sequences of Table 6, or the exogenous nucleic acid comprises a sequence at least 80% identical to at least 10 contiguous bases of any one of the target gene sequences of Table 6. 176. The donor nucleic acid of any one of embodiments 155-157, wherein the endogenous or exogenous nucleic acid encodes a peptide. 177. The donor nucleic acid of embodiment 176, wherein the coding region for the peptide is flanked by a 5′ribosomal binding site (RBS). 178. The donor nucleic acid of embodiment 177, wherein the RBS is 4-20 bases in length. 179. The donor nucleic acid of any one of embodiments 176-178, wherein the peptide affects one or more property of a cell selected from: hormonal regulation, protection against a pathogen, protection against an insect, nitrogen fixation, nutrient acquisition, immunity induction, biotic stress, or abiotic stress, or a combination thereof. 180. The donor nucleic acid of any one of embodiments 176-179, wherein the peptide is 2-80 amino acids in length, 3-80, 4-80, 5-80, 6-80, 7-80, 8-80, 9-80, 10-80, 20-80, 30-80, 40-80, 50-80, 60-80, 70-80 or 1-80 amino acids in length. 181. The donor nucleic acid of any one of embodiments 176-180, wherein the peptide is selected from Table 7. 182. The donor nucleic acid of any one of embodiments 176-181, wherein the peptide is encoded by a sequence at least 80% identical to a sequence of Table 8. 183. The donor nucleic acid of any one of embodiments 155-182, wherein the endogenous or exogenous nucleic acid comprises a sequence at least 80% identical to a sequence of Table 8. 184. The donor nucleic acid of any one of embodiments 155-183, wherein the donor nucleic acid is a blunt linear double-stranded oligodeoxynucleotide (dsODN). 185. The donor nucleic acid of any one of embodiments 155-183, wherein the donor nucleic acid is a single-stranded oligodeoxynucleotide (ssODN). 186. The donor nucleic acid of any one of embodiments 155-183, wherein the donor nucleic acid is a plasmid donor. 187. The donor of nucleic acid of any one of embodiments 155-186, comprising one or two nuclease recognition sites. 188. The donor nucleic acid of any one of embodiments 155-187, comprising 2 nucleotides of phosphorothioate linkages at the 5′- and 3′-ends of both DNA strands of the exogenous nucleic acid. 189. The donor nucleic acid of any one of embodiments 155-188, wherein the donor nucleic acid is phosphorylated at the 5′ end of both strands of the exogenous nucleic acid.

[0120] 190. A kit comprising the donor nucleic acid of any one of embodiments 155-189, and a nucleic acid sequence encoding a DNA nuclease. 191. The kit of embodiment 190, wherein the DNA nuclease is as exemplified in Example 1. 192. The kit of embodiment 190 or embodiment 191, wherein the DNA nuclease is a CRISPR associated nuclease. 193. The kit of embodiment 192, wherein the CRISPR associated nuclease comprises Cas9. 194. The kit of any one of embodiments 190-193, wherein the nucleic acid sequence encoding the DNA nuclease further encodes one or more guide RNA (gRNA). 195. The kit of embodiment 194, wherein the one or more gRNA are selected from Table 4. 196. The kit of embodiment 190, wherein the DNA nuclease is a Transcription Activator-Like Effector Nuclease (TALEN). 197. The kit of any one of embodiments 190-196, wherein the DNA nuclease is connected to a sequence encoding VirD2 (e.g., Table 5).

[0121] 198. A combination comprising the donor nucleic acid of any one of embodiments 155-189, or the kit of any one of embodiments 190-197, and a cell comprising an acceptor non-coding region for insertion of the donor nucleic acid sequence. 199. The combination of embodiment 198, wherein the cell is a plant cell. 200. The combination of embodiment 199, wherein the plant is a dicotyledonous plant. 201. The combination of embodiment 200, wherein the dicotyledonous plant is selected from Table 9. 202. The combination of embodiment 199, wherein the plant is a monocotyledonous plant. 203. The combination of embodiment 202, wherein the monocotyledonous plant is selected from Table 9. 204. The combination of embodiment 199, wherein the plant cell is a ground tissue cell. 205. The combination of embodiment 204, wherein the tissue cell is a parenchyma, collenchyma, or sclerenchyma cell. 206. The combination of embodiment 199, wherein the plant cell is a vascular tissue cell. 207. The combination of embodiment 206, wherein the tissue cell is a tracheid, vessel element, sieve tube cell, or companion cell. 208. The combination of embodiment 199, wherein the plant cell is a dermal tissue cell. 209. The combination of embodiment 208, wherein the tissue cell is a epidermal, guard cell, or trichome. 210. The combination of any one of embodiments 198-209, wherein the cell is not transgenic. 211. The combination of any one of embodiments 198-210, wherein the endogenous or exogenous nucleic acid is introduced into the cell via non-homologous recombination. 212. The combination of embodiment 211, wherein the endogenous or exogenous nucleic acid is introduced into the cell via non-homologous end-joining. 213. The combination of embodiment 211 or embodiment 212, wherein the endogenous or exogenous nucleic acid is introduced into the cell via homology-independent targeted integration (HITI). 214. The combination of any one of embodiments 198-213, wherein the endogenous or exogenous nucleic acid is introduced into the cell via nuclease gene editing. 215. The combination of embodiment 214, wherein the nuclease gene editing comprises CRISPR-Cas gene editing.

[0122] 216. A method of generating a cell with a modified non-coding region, the method comprising introducing into the cell the donor nucleic acid of any one of embodiments 155-189, or the kit of any one of embodiments 190-197. 217. The method of embodiment 216, wherein the modified non-coding region comprises the endogenous or exogenous nucleic acid. 218. A method of generating a cell comprising a modified non-coding region, the method comprising introducing an endogenous or exogenous nucleic acid into a non-coding region of a gene in the cell. 219. The method of any one of embodiments 216-218, wherein the cell is a plant cell. 220. The method of any one of embodiments 216-219, wherein the endogenous or exogenous nucleic acid is introduced via non-homologous recombination. 221. The method of embodiment 220, wherein the endogenous or exogenous nucleic acid is introduced via non-homologous end-joining. 222. The method of embodiment 220 or embodiment 221, wherein the endogenous or exogenous nucleic acid is introduced via homology-independent targeted integration (HITI). 223. The method of any one of embodiments 216-222, wherein the endogenous or exogenous nucleic acid is introduced via nuclease gene editing. 224. The method of embodiment 223, wherein the nuclease gene editing comprises CRISPR-Cas gene editing. 225. A method of reducing or eliminating expression of a target gene in a cell, the method comprising introducing into a non-coding region of the cell an endogenous or exogenous nucleic acid, wherein the endogenous or exogenous nucleic acid encodes for a sequence that is capable of binding to mRNA of the target gene, thereby reducing or eliminating expression of the target gene. 226. A method of regulating a target gene or peptide in a cell, the method comprising introducing into a non-coding region of the cell an endogenous or exogenous nucleic acid, wherein the exogenous nucleic acid encodes for an amino acid sequence that is capable of regulating the target gene or peptide in the cell, thereby regulating the target gene or peptide in the cell. 227. A method of introducing, increasing, or reducing a trait in a host, the method comprising introducing into a non-coding region of a cell of the host an endogenous or exogenous nucleic acid, wherein the endogenous or exogenous nucleic acid encodes for a sequence that is capable of binding to mRNA of a target gene, thereby introducing, increasing, or reducing a trait in the host. 228. A method of introducing, increasing, or reducing a trait in a host, the method comprising introducing into a non-coding region of a cell of the host an exogenous nucleic acid, wherein the endogenous or exogenous nucleic acid encodes for an amino acid sequence that is capable of regulating a target gene or peptide in the cell, thereby introducing, increasing or reducing a trait in the host. 229. The method of embodiment 227 or embodiment 228, wherein the host is a plant. 230. The method of embodiment 229, wherein the plant is a dicotyledonous plant. 231. The method of embodiment 230, wherein the dicotyledonous plant is selected from Table 9. 232. The method of embodiment 229, wherein the plant is a monocotyledonous plant. 233. The method of embodiment 232, wherein the monocotyledonous plant is selected from Table 9. 234. The method of any one of embodiments 229-233, wherein the plant is not transgenic. 235. The method of any one of embodiments 227-234, wherein the trait comprises hormonal regulation, protection against a pathogen, protection against an insect, nitrogen fixation, nutrient acquisition, immunity induction, biotic stress, or abiotic stress, or a combination thereof. 236. The method of any one of embodiments 227-235, wherein the trait comprises resistance to a pest. 237. The method of embodiment 236, wherein the pest is an insect, bacteria, fungi, worm (e.g., larva of the insect, and nematode), or a combination thereof. 238. The method of embodiment 236 or embodiment 237, wherein the pest is selected from Table 6. 239. The method of any one of embodiments 236-238, wherein the resistance is due to antibiosis (growth and multiplication of the pest is inhibited), antixenosis (the pest is repelled by the plant), or tolerance (plant is able to withstand or recover from damage by the pest). 240. The method of any one of embodiments 236-239, wherein the host has a superior yield as compared to a host that does not comprise the exogenous nucleic acid, when the hosts are both under attack by the pest. 241. The method of any one of embodiments 227-240, wherein the trait comprises resistance to a disease. 242. The method of embodiment 241, wherein the disease is caused by a pest. 243. The method of embodiment 242, wherein the pest is an insect, bacteria, fungi, worm (e.g., larva of the insect, and nematode), or a combination thereof. 244. The method of embodiment 242 or embodiment 243, wherein the pest is selected from Table 6. 245. The method of any one of embodiments 241-244, wherein the resistance is due to antibiosis (growth and multiplication of the pest is inhibited), antixenosis (the pest is repelled by the plant), or tolerance (plant is able to withstand or recover from damage by the pest). 246. The method of any one of embodiments 241-245, wherein the resistant host has a superior yield as compared to a host that does not comprise the cell of any one of embodiments 1-120, when the hosts are both exposed to the disease. 247. The method of any one of embodiments 227-246, wherein the trait comprises resistance to a chemical. 248. The method of embodiment 247, wherein the chemical is a weed control chemical. 249. The method of embodiment 248, wherein the weed control chemical is a growth inhibitor. 250. The method of embodiment 247, wherein the chemical is a herbicide. 251. The method of embodiment 250, wherein the herbicide is 2,4-D (2,4-dichlorophenoxy acetic acid), Aminopyralid, Atrazine, Clopyralid, Dicamba, Glufosinate ammonium, Fluazifop, Fluroxypyr, Glyphosate, Imazapyr, Imazapic, Imazamox, Linuron, MCPA (2-methyl-4-chlorophenoxyacetic acid), Metolachlor, Paraquat, Pendimethalin, Picloram, Sodium chlorate, Triclopyr, Sulfonylureas (e.g., Flazasulfuron and Metsulfuron-methyl), or a combination thereof. 252. The method of any one of embodiments 227-251, wherein the trait confers an improved nutritional and/or visual quality as compared to a host that does not comprise the exogenous nucleic acid (e.g., measurable using a spectrometric method). 253. The method of any one of embodiments 227-252, wherein the trait confers an increase in crop yield as compared to a plant that does not comprise the exogenous nucleic acid. 254. The method of any one of embodiments 227-253, wherein the trait confers an ability to acquire a nutrient (e.g., nitrogen, phosphorus, potassium and/or plant micronutrients) at least 10% more efficiently as compared to a host that does not comprise the endogenous or exogenous nucleic acid (e.g., measurable using a spectrophotometric method). 255. The method of any one of embodiments 227-254, wherein the trait confers an ability to acquire water at least 10% more efficiently as compared to a host that does not comprise the endogenous or exogenous nucleic acid (e.g., measurable using the host fresh weight when they were subjected to, for example, drought stress). 256. The method of any one of embodiments 227-255, wherein the trait confers at least 10% improved photosynthetic efficiency as compared to a host that does not comprise the exogenous nucleic acid (e.g., measurable using, for example, a gas-exchange analyzer). 257. The method of any one of embodiments 225-256, wherein the endogenous or exogenous nucleic acid is about 10 to about 700 bases in length, about 10 to about 600 bases in length, about 10 to about 500 bases in length, about 10 to about 400 bases in length, about 10 to about 300 bases in length, about 10 to about 200 bases in length, about 10 to about 180 bases, about 10 to about 160 bases, about 10 to about 140 bases, about 10 to about 120 bases, about 10 to about 110 bases, or about 10 to about 100 bases in length. 258. The method of any one of embodiments 225-257, wherein the endogenous or exogenous nucleic acid is less than 200 bases in length. 259. The method of any one of embodiments 225-258, wherein the endogenous or exogenous nucleic acid encodes a micro RNA (miRNA). 260. The method of embodiment 259, wherein the miRNA is expressed as a short tandem target mimic (STTM) comprising two copies of partially complementary RNA linked by a spacer. 261. The method of embodiment 260, wherein the spacer has a length of about 6 to about 60 nucleobases. 262. The method of embodiment 260 or embodiment 261, wherein each of the two copies of partially complementary RNA have a length of about 10 to about 30 nucleobases. 263. The method of any one of embodiments 259-262, wherein the miRNA specifically binds to a target nucleic acid. 264. The method of embodiment 263, wherein the target nucleic acid is responsible for water acquisition, nutrient acquisition, disease control, or pest control, or any combination thereof. 265. The method of embodiment 263 or embodiment 264, wherein the target nucleic acid comprises a regulatory element involved in: plant growth and development, yield, biotic stress, abiotic stress, or herbicide resistance, or any combination thereof. 266. The method of any one of embodiments 263-265, wherein the target nucleic acid is from an insect, bacteria, fungi, worm (e.g., larva of the insect, and nematode), or a combination thereof, that is harmful to a cell. 267. The method of any one of embodiments 263-266, wherein the target nucleic acid is present in a target pest selected from Table 6. 268. The method of any one of embodiments 263-267, wherein the target nucleic acid is selected from the target genes in Table 6. 269. The method of any one of embodiments 263-268, wherein the target nucleic acid is from an organism that causes a disease to a cell. 270. The method of embodiment 269, wherein the organism is any one selected from Table 6. 271. The method of any one of embodiments 263-270, wherein the target nucleic acid is a target mRNA. 272. The method of embodiment 271, wherein the target mRNA comprises a sequence at least 70% identical to a sequence of Table 6. 273. The method of embodiment 271 or embodiment 272, wherein the target mRNA is encoded from a target gene. 274. The method of embodiment 273, wherein the target gene is selected from a gene of Table 6. 275. The method of embodiment 273 or embodiment 274, wherein the target gene comprises a sequence at least 70% identical to a sequence of Table 6. 276. The method of any one of embodiments 225-275, wherein the endogenous or exogenous nucleic acid comprises a sequence at least 70% identical to a sequence of any one of the target gene sequences of Table 6, or the exogenous nucleic acid comprises a sequence at least 80% identical to at least 10 contiguous bases of any one of the target gene sequences of Table 6. 277. The method of any one of embodiments 225-258, wherein the endogenous or exogenous nucleic acid encodes a peptide. 278. The method of embodiment 277, wherein the endogenous or exogenous nucleic acid is flanked by a 5′ribosomal binding site (RBS). 279. The method of embodiment 278, wherein the RBS is 4-20 bases in length. 280. The method of any one of embodiments 277-279, wherein the peptide affects one or more property of a cell selected from: hormonal regulation, protection against a pathogen, protection against an insect, nitrogen fixation, nutrient acquisition, immunity induction, biotic stress, or abiotic stress, or a combination thereof. 281. The method of any one of embodiments 277-280, wherein the peptide is 2-80 amino acids in length, 3-80, 4-80, 5-80, 6-80, 7-80, 8-80, 9-80, 10-80, 20-80, 30-80, 40-80, 50-80, 60-80, 70-80 or 1-80 amino acids in length. 282. The method of any one of embodiments 277-281, wherein the peptide is selected from Table 7. 283. The method of any one of embodiments 277-282, wherein the peptide is encoded by a sequence at least 80% identical to a sequence of Table 8. 284. The method of any one of embodiments 225-283, wherein the exogenous nucleic acid comprises a sequence at least 80% identical to a sequence of Table 8. 285. The method of any one of embodiments 225-284, wherein the cell is a plant cell. 286. The method of embodiment 285, wherein the plant is a dicotyledonous plant. 287. The method of embodiment 286, wherein the dicotyledonous plant is selected from Table 9. 288. The method of embodiment 285, wherein the plant is a monocotyledonous plant. 289. The method of embodiment 288, wherein the monocotyledonous plant is selected from Table 9. 290. The method of any one of embodiments 285-289, wherein the plant cell is a ground tissue cell. 291. The method of embodiment 290, wherein the tissue cell is a parenchyma, collenchyma, or sclerenchyma cell. 292. The method of any one of embodiments 285-289, wherein the plant cell is a vascular tissue cell. 293. The method of embodiment 292, wherein the tissue cell is a tracheid, vessel element, sieve tube cell, or companion cell. 294. The method of any one of embodiments 285-289, wherein the plant cell is a dermal tissue cell. 295. The method of embodiment 294, wherein the tissue cell is a epidermal, guard cell, or trichome.

[0123] 296. The method of any one of embodiments 225-295, wherein the cell is not transgenic. 297. The method of any one of embodiments 216-296, wherein the non-coding region comprises an intron and the intron comprises the endogenous or exogeneous nucleic acid. 298. The method of any one of embodiments 216-297, wherein the non-coding region comprises a 5′ non-coding region, and the 5′ non-coding region comprises the endogenous or exogenous nucleic acid. 299. The method of any one of embodiments 216-298, wherein the non-coding region comprises a 3′ non-coding region, and the 3′ non-coding region comprises the endogenous or exogeneous nucleic acid. 300. The donor nucleic acid of any one of embodiments 155-189, the kit of any one of embodiments 190-197, or the combination of any one of embodiments 198-215, wherein the non-coding region comprises an intron and the intron comprises the exogenous nucleic acid. 301. The donor nucleic acid of any one of embodiments 155-189, the kit of any one of embodiments 190-197, or the combination of any one of embodiments 198-215, wherein the non-coding region comprises a 5′ non-coding region, and the 5′ non-coding region comprises the endogenous or exogenous nucleic acid. 302. The donor nucleic acid of any one of embodiments 155-189, the kit of any one of embodiments 190-197, or the method of any one of embodiments 198-215, wherein the non-coding region comprises a 3′ non-coding region, and the 3′ non-coding region comprises the endogenous or exogeneous nucleic acid. 303. The cell of embodiment 14, wherein the non-coding region comprises the modified intron region positioned between the first exon region and the second exon region, and wherein the first exon region and the second exon region are regions of a gene. 304. The cell of embodiment 14, wherein the non-coding region comprises the 5′ non-coding region, and the 5′ non-coding region is upstream of a gene. 305. The cell of embodiment 14, wherein the non-coding region comprises the 3′ non-coding region, and the 3′ non-coding region is downstream of a gene.

### EXAMPLES

[0124] The following examples are illustrative of the embodiments described herein and are not to be interpreted as limiting the scope of this disclosure. To the extent that specific materials are mentioned, it is merely for purposes of illustration and is not intended to be limiting. One skilled in the art may develop equivalent means or reactants without the exercise of inventive capacity and without departing from the scope of this disclosure.

### Example 1: Preparation of a Donor DNA Plasmid and a CRISPR Plasmid

[0125] This example illustrates the construction of vectors designed for generating engineered cells described herein. A donor plasmid as described in Table 10 is prepared to deliver the amiRNA. The exemplified amiRNA is the ath-MIR172b (SEQ ID NO: 1471). The amiRNA exemplified is flanked by the guide sequence 29rev from Os03t0718100-01 intron 1 of Table 4, in both sites (5′ and 3′ ends). The two guide sequences and PAM motif enable donor DNA release from the plasmid and insertion on the intron1 of the Actin1 (SEQ ID NO: 1286) in the rice host plant. The original plasmid is the pUC19. A schematic map of the donor plasmid is shown in FIG. 3.

TABLE 10
Donor Plasmid Sequences (from 5′ to 3′). The first column (SEQ ID NO)
contains the sequence identifier of non-limiting examples of acid nucleic sequences of a donor
plasmid. The second column (Feature/Position) describes the feature name and the position of
the sequence into the plasmid. The third column (Sequence) contains the acid nucleic sequence
of the referred feature.

| SEQ | | |
|---|---|---|
| ID | | |
| NO. | Feature/Position | Sequence |
| 1467 | ori | gagatacctacagcgtgagctatgagaaagcgccacgcttcccgaagggagaaaggcggacaggt |
| | (position 1-217) | atccggtaagcggcagggtcggaacaggagagcgcacgagggagcttccagggggaaacgcct |
| | | ggtatctttatagtcctgtcgggtttcgccacctctgacttgagcgtcgatttttgtgatgctcgtc |
| | | aggggggcggagcctatggaaa |
| 1468 | space | aacgccagcaacgcggcctttttacggttcctggccttttgctggccttttgctcacatgttctttc |
| | (position 218- | ctgcgttatcccctgattctgtggataaccgtattaccgcctttgagtgagctgataccgctcgccg |
| | 375) | cagccgaacgaccgagcgcagcga |
| 1469 | guide 29rev | aaatgcagcatttcggtaaa |
| | (position 376- | |
| | 395) | |
| 1470 | PAM | cgg |
| | (position 396- | |
| | 398) | |
| 1471 | donor DNA | AAACGGAGGCGCAGCACCATTAAGATTCACATGGAAATTGA |
| | (position 392- | TAAATACCCTAAATTAGGGTTTTGATATGTATATGAGAATCT |
| | 499) | TGATGATGCTGCATCAACCCGTTT |
| 1472 | PAM | ccg |
| | (position 494- | |
| | 496) | |
| 1473 | Sequence | tttaccgaaatgctgcattt |
| | complementary to | |
| | guide 29rev | |
| | (position 497- | |
| | 516) | |
| 1474 | space | gtcagtgagcgaggaagcggaagagcgcccaatacgcaaaccgcctctccccgcgcgttggccga |
| | (position 517- | ttcattaatgcagctggcacgacaggtttcccgactggaaagcgggcagtgagcgcaacgcaat |
| | 645) | |
| 1475 | CAP binding site | taatgtgagttagctcactcat |
| | (position 646- | |
| | 667) | |
| 1476 | space | taggcaccccaggc |
| | (position 668- | |
| | 681) | |
| 1477 | lac promoter | tttacactttatgcttccggctcgtatgttg |
| | (position 682- | |
| | 712) | |
| 1478 | space | tgtggaattgtgagcggataacaatttcacacaggaaacagct |
| | (position 713- | |
| | 755) | |
| 1479 | lacZa | atgaccatgattacgccaagcttgcatgcctgcaggtcgactctagaggatccccgggtaccgagct |
| | (position 756- | cgaattcactggccgtcgttttacaacgtcgtgactgggaaaaccctggcgttacccaacttaatcg |
| | 1079) | ccttgcagcacatccccctttcgccagctggcgtaatagcgaagaggcccgcaccgatcgcccttcc |
| | | caacagttgcgcagcctgaatggcgaatggcgcctgatgcggtattttctccttacgcatctgtgcg |
| | | gtatttcacaccgcatatggtgcactctcagtacaatctgctctgatgccgcatag |
| 1480 | space | ttaagccagccccgacacccgccaacacccgctgacgcgccctgacgggcttgtctgctcccggca |
| | (position 1080- | tccgcttacagacaagctgtgaccgtctccgggagctgcatgtgtcagaggttttcaccgtcatcac |
| | 1319) | cgaaacgcgcgagacgaaagggcctcgtgatacgcctatttttataggttaatgtcatgataataat |
| | | ggtttcttagacgtcaggtggcacttttcggggaaatgtg |
| 1481 | AmpR promoter | cgcggaacccctatttgtttatttttctaaatacattcaaatatgtatccgctcatgagacaataac |
| | (position 1320- | cctgataaatgcttcaataatattgaaaaaggaagagt |
| | 1424) | |
| 1482 | AmpR | atgagtattcaacatttccgtgtcgcccttattcccttttttgcggcattttgccttcctgtttttg |
| | (position 1425- | ctcacccagaaacgctggtgaaagtaaaagatgctgaagatcagttgggtgcacgagtgggttacat |
| | 2285) | cgaactggatctcaacagcggtaagatccttgagagttttcgccccgaagaacgttttccaatgatg |
| | | agcacttttaaagttctgctatgtggcgcggtattatcccgtattgacgccgggcaagagcaactcg |
| | | gtcgccgcatacactattctcagaatgacttggttgagtactcaccagtcacagaaaagcatcttac |
| | | ggatggcatgacagtaagagaattatgcagtgctgccataaccatgagtgataacactgcggccaac |
| | | ttacttctgacaacgatcggaggaccgaaggagctaaccgcttttttgcacaacatgggggatcatg |
| | | taactcgccttgatcgttgggaaccggagctgaatgaagccataccaaacgacgagcgtgacaccac |
| | | gatgcctgtagcaatggcaacaacgttgcgcaaactattaactggcgaactacttactctagcttcc |
| | | cggcaacaattaatagactggatggaggcggataaagttgcaggaccacttctgcgctcggcccttc |
| | | cggctggctggtttattgctgataaatctggagccggtgagcgtgggtctcgcggtatcattgcagc |
| | | actggggccagatggtaagccctcccgtatcgtagttatctacacgacggggagtcaggcaactatg |
| | | gatgaacgaaatagacagatcgctgagataggtgcctcactgattaagcattggtaa |
| 1483 | space | ctgtcagaccaagtttactcatatatactttagattgatttaaaacttcatttttaatttaaaagga |
| | (position 2286- | tctaggtgaagatcctttttgataatctcatgaccaaaatcccttaacgtgagttttcgttccactg |
| | 2455) | agcgtcagaccccgtagaaaagatcaaaggatcttc |
| 1484 | ori | ttgagatcctttttttctgcgcgtaatctgctgcttgcaaacaaaaaaaccaccgctaccagcggtg |
| | (position 2456- | gtttgtttgccggatcaagagctaccaactctttttccgaaggtaactggcttcagcagagcgcaga |
| | 2827) | taccaaatactgttcttctagtgtagccgtagttaggccaccacttcaagaactctgtagcaccgcc |
| | | tacatacctcgctctgctaatcctgttaccagtggctgctgccagtggcgataagtcgtgtcttacc |
| | | gggttggactcaagacgatagttaccggataaggcgcagcggtcgggctgaacggggggttcgtgca |
| | | cacagcccagcttggagcgaacgacctacaccgaact |

[0126] A CRISPR-Cas9 plasmid as described in Table 11 is prepared. The original plasmid is the pBUN411, which is available on https://www.addgene.org/50581/. The guide sequence 29rev from Os03t0718100-01 intron 1 of Table 4 is used. A schematic map of the CRISPR-Cas9 plasmid is shown in FIG. 4.

TABLE 11
CRISPR-Cas 9 Plasmid Sequences (from 5′ to 3′). The first column (SEQ
ID NO) contains the sequence identifier of non-limiting examples of acid nucleic sequences of a
CRISPR-Cas 9 plasmid. The second column (Feature/Position) describes the feature name and the
position of the sequence into the plasmid. The third column (Sequence) contains the acid
nucleic sequence of the referred feature.

| SEQ | | |
|---|---|---|
| ID | | |
| NO. | Position | Sequence |
| 1485 | space | taaacgctcttttctcttag |
| | (position 1-20) | |
| 1486 | RB T-DNA | gtttacccgccaatatatcctgtca |
| | repeat (position | |
| | 21-45) | |
| 1487 | space | aacactgatagtttaaactgaaggcgggaaacgacaatctgatccaagctcaagctgctctagcatt |
| | (position 46- | cgccattcaggctgcgcaactgttgggaagggcgatcggtgcgggcctcttcgctattacgccagct |
| | 330) | ggcgaaagggggatgtgctgcaaggcgattaagttgggtaacgccagggttttcccagtcacgacgt |
| | | tgtaaaacgacggccagtgccaagcttagtaattcatccaggtcaccaagttctaggattttcagaa |
| | | ctgcaacttattttatc |
| 1488 | OsU3 promoter | aaggaatctttaaacatacgaacagatcacttaaagttcttctgaagcaacttaaagttatcaggca |
| | (position 331- | tgcatggatcttggaggaatcagatgtgcagtcagggaccatagcacaagacaggcgtcttctactg |
| | 707) | gtgctaccagcaaatgctggaagccgggaacactgggtacgttggaaaccacgtgatgtgaagaagt |
| | | aagataaactgtaggagaaaagcatttcgtagtgggccatgaagcctttcaggacatgtattgcagt |
| | | atgggccggcccattacgcaattggacgacaacaaagactagtattagtaccacctcggctatccac |
| | | atagatcaaagctgatttaaaagagttgtgcagatgatccgt |
| 1489 | space | ggcg |
| | (position 708- | |
| | 711) | |
| 1490 | guide sequence | aaatgcagcatttcggtaaa |
| | (position 712- | |
| | 731) | |
| 1491 | gRNA scaffold | gttttagagctagaaatagcaagttaaaataaggctagtccgttatcaacttgaaaaagtggcaccg |
| | (position 732- | agtcggtgc |
| | 807) | |
| 1492 | space | ttttttttttcgttttgcattgagttttctccgtcgcatgtttgcagttttattttccgttttgcat |
| | (position 808- | tgaaatttctccgtctcatgtttgcagcgtgttcaaaaagtacgcagctgtatttcacttatttacg |
| | 1110) | gcgccacattttcatgccgtttgtgccaactatcccgagctagtgaatacagcttggcttcacacaa |
| | | cactggtgacccgctgacctgctcgtacctcgtaccgtcgtacggcacagcatttggaattaaaggg |
| | | tgtgatcgatactgcttgctgctaagcttgcatgc |
| 1493 | Ubi promoter | ctgcagtgcagcgtgacccggtcgtgcccctctctagagataatgagcattgcatgtctaagttata |
| | (position 1111- | aaaaattaccacatattttttttgtcacacttgtttgaagtgcagtttatctatctttatacatata |
| | 3102) | tttaaactttactctacgaataatataatctatagtactacaataatatcagtgttttagagaatca |
| | | tataaatgaacagttagacatggtctaaaggacaattgagtattttgacaacaggactctacagttt |
| | | tatctttttagtgtgcatgtgttctcctttttttttgcaaatagcttcacctatataatacttcatc |
| | | cattttattagtacatccatttagggtttagggttaatggtttttatagactaatttttttagtaca |
| | | tctattttattctattttagcctctaaattaagaaaactaaaactctattttagtttttttatttaa |
| | | taatttagatataaaatagaataaaataaagtgactaaaaattaaacaaataccctttaagaaatta |
| | | aaaaaactaaggaaacatttttcttgtttcgagtagataatgccagcctgttaaacgccgtcgacga |
| | | gtctaacggacaccaaccagcgaaccagcagcgtcgcgtcgggccaagcgaagcagacggcacggca |
| | | tctctgtcgctgcctctggacccctctcgagagttccgctccaccgttggacttgctccgctgtcgg |
| | | catccagaaattgcgtggcggagcggcagacgtgagccggcacggcaggcggcctcctcctcctctc |
| | | acggcacggcagctacgggggattcctttcccaccgctccttcgctttcccttcctcgcccgccgta |
| | | ataaatagacaccccctccacaccctctttccccaacctcgtgttgttcggagcgcacacacacaca |
| | | ccatggttagggcccggtagttctacttctgttcatgtttgtgttagatccgtgtttgtgttagatc |
| | | cgaccagatctcccccaaatccacccgtcggcacctccgcttcaaggtacgccgctcgtcctccccc |
| | | cccccccctctctaccttctctagatcggcgttccggttgctgctagcgttcgtacacggatgcgac |
| | | ctgtacgtcagacacgttctgattgctaacttgccagtgtttctctttggggaatcctgggatggct |
| | | ctagccgttccgcagacgggatcgatttcatgattttttttgtttcgttgcatagggtttggtttgc |
| | | ccttttcctttatttcaatatatgccgtgcacttgtttgtcgggtcatcttttcatgcttttttttg |
| | | tcttggttgtgatgatgtggtctggttgggcggtcgttctagatcggagtagaattctgtttcaaac |
| | | tacctggtggatttattaattttggatctgtatgtgtgtgccatacatattcatagttacgaattga |
| | | agatgatggatggaaatatcgatctaggataggtatacatgttgatgcgggttttactgatgcatat |
| | | acagagatgctttttgttcgcttggttgtgatgatgtggtgtggttgggcggtcgttcattcgttct |
| | | agatcggagtagaatactgtttcaaactacctggtgtatttattaattttggaactgtatgtgtgtg |
| | | tcatacatcttcatagttacgagtttaagatggatggaaatatcgatctaggataggtatacatgtt |
| | | gatgtgggttttactgatgcatatacatgatggcatatgcagcatctattcatatgctctaaccttg |
| | | tagtacctatctattataataaacaagtatgttttataattattttgatcttgaatacttggatgat |
| | | ggcatatgcagcagctatatgtggatttttttagccctgccttcatacgctatttatttgcttggta |
| | | ctgtttcttttgtcgatgctcaccctgttgtttggtgttacttctgcag |
| 1494 | space | ccctaggcctactagatg |
| | (position 3103- | |
| | 3120) | |
| 1495 | 3xFLAG | gattacaaggaccacgacggggattacaaggaccacgacattgattacaaggatgatgatgacaag |
| | (position 3121- | |
| | 3186) | |
| 1496 | space | atggct |
| | (position 3187- | |
| | 3792) | |
| 1497 | SV40 NLS | ccgaagaagaagaggaaggtt |
| | (position 3193- | |
| | 3213) | |
| 1498 | space | ggcatccacggggtgccagctgct |
| | (position 2314- | |
| | 3237) | |
| 1499 | Cas9 | gacaagaagtactcgatcggcctcgatattgggactaactctgttggctgggccgtgatcaccgacg |
| | (position 3238- | agtacaaggtgccctcaaagaagttcaaggtcctgggcaacaccgatcggcattccatcaagaagaa |
| | 7338) | tctcattggcgctctcctgttcgacagcggcgagacggctgaggctacgcggctcaagcgcaccgcc |
| | | cgcaggcggtacacgcgcaggaagaatcgcatctgctacctgcaggagattttctccaacgagatgg |
| | | cgaaggttgacgattctttcttccacaggctggaggagtcattcctcgtggaggaggataagaagca |
| | | cgagcggcatccaatcttcggcaacattgtcgacgaggttgcctaccacgagaagtaccctacgatc |
| | | taccatctgcggaagaagctcgtggactccacagataaggcggacctccgcctgatctacctcgctc |
| | | tggcccacatgattaagttcaggggccatttcctgatcgagggggatctcaacccggacaatagcga |
| | | tgttgacaagctgttcatccagctcgtgcagacgtacaaccagctcttcgaggagaaccccattaat |
| | | gcgtcaggcgtcgacgcgaaggctatcctgtccgctaggctctcgaagtctcggcgcctcgagaacc |
| | | tgatcgcccagctgccgggcgagaagaagaacggcctgttcgggaatctcattgcgctcagcctggg |
| | | gctcacgcccaacttcaagtcgaatttcgatctcgctgaggacgccaagctgcagctctccaaggac |
| | | acatacgacgatgacctggataacctcctggcccagatcggcgatcagtacgcggacctgttcctcg |
| | | ctgccaagaatctgtcggacgccatcctcctgtctgatattctcagggtgaacaccgagattacgaa |
| | | ggctccgctctcagcctccatgatcaagcgctacgacgagcaccatcaggatctgaccctcctgaag |
| | | gcgctggtcaggcagcagctccccgagaagtacaaggagatcttcttcgatcagtcgaagaacggct |
| | | acgctgggtacattgacggcggggcctctcaggaggagttctacaagttcatcaagccgattctgga |
| | | gaagatggacggcacggaggagctgctggtgaagctcaatcgcgaggacctcctgaggaagcagcgg |
| | | acattcgataacggcagcatcccacaccagattcatctcggggagctgcacgctatcctgaggaggc |
| | | aggaggacttctaccctttcctcaaggataaccgcgagaagatcgagaagattctgactttcaggat |
| | | cccgtactacgtcggcccactcgctaggggcaactcccgcttcgcttggatgacccgcaagtcagag |
| | | gagacgatcacgccgtggaacttcgaggaggtggtcgacaagggcgctagcgctcagtcgttcatcg |
| | | agaggatgacgaatttcgacaagaacctgccaaatgagaaggtgctccctaagcactcgctcctgta |
| | | cgagtacttcacagtctacaacgagctgactaaggtgaagtatgtgaccgagggcatgaggaagccg |
| | | accggaaggtcacggttaagcagctcaaggaggactacttcaagaagattgagtgcttcgattcggt |
| | | cggctttcctgtctggggagcagaagaaggccatcgtggacctcctgttcaagaccaagatctctgg |
| | | cgttgaggaccgcttcaacgcctccctggggacctaccacgatctcctgaagatcattaaggataag |
| | | gacttcctggacaacgaggagaatgaggatatcctcgaggacattgtgctgacactcactctgttcg |
| | | caggaccgggagatgatcgaggagcgcctgaagacttacgcccatctcttcgatgacaaggtcatga |
| | | agcagctcaagaggaggaggtacacggctgggggaggctgagcaggaagctcatcaacggcattcgg |
| | | gacaagcagtccgggaagacgatcctcgacttcctgaagagcgatggcttcgcgaaccgcaatttca |
| | | tgcagctgattcacgatgacagcctcacattcaaggaggatatccagaaggctcaggtgagcggcca |
| | | tgagaacatcgtcattgagatggcccgggagaatcagaccacgcagaagggccagaagaactcacgc |
| | | gagggggactcgctgcacgagcatatcgcgaacctcgctggctcgccagctatcaagaaggggattc |
| | | tgcagaccgtgaaggttgtggacgagctggtgaaggtcatgggcaggcacaagccgaggatgaagag |
| | | gatcgaggagggcattaaggagctggggtcccagatcctcaaggagcacccggtggagaacacgcag |
| | | ctgcagaatgagaagctctacctgtactacctccagaatggccgcgatatgtatgtggaccaggagc |
| | | tggatattaacaggctcagcgattacgacgtcgatcatatcgttccacagtcattcctgaaggatga |
| | | gctccattgacaacaaggtcctcaccaggtcggacaagaaccggggcaagtctgataatgttccttc |
| | | agaggaggtcgttaagaagatgaagaactactggcgccagctcctgaatgccaagctgatcacgcag |
| | | cggaagttcgataacctcacaaaggctgagagggcgggctctctgagctggacaaggcgggcttcat |
| | | caagaggcagctggtcgagacacggcagatcactaagcacgttgcgcagattctcgactcacggatg |
| | | aacactaagtacgatgagaatgacaagctgatccgcgaggtgaaggtcatcaccctgaagtcaaagc |
| | | tcgtctccgacttcaggaaggatttccagttctacaaggttcgggagatcaacaattaccaccatgc |
| | | ccatgacgcgtacctgaacgcggtggtcggcacagctctgatcaagaagtacccaaagctcgagagc |
| | | gagttcgtgtacggggactacaaggtttacgatgtgaggaagatgatcgccaagtcggagcaggaga |
| | | ttggcaaggctaccgccaagtacttcttctactctaacattatgaatttcttcaagacagagatcac |
| | | tctggccaatggcgagatccggaagcgccccctcatcgagacgaacggcgagacgggggagatcgtg |
| | | tgggacaagggcagggatttcgcgaccgtcaggaaggttctctccatgccacaagtgaatatcgtca |
| | | agaagacagaggtccagactggcgggttctctaaggagtcaattctgcctaagcggaacagcgacaa |
| | | gctcatcgcccgcaagaaggactgggatccgaagaagtacggcgggttcgacagccccactgtggcc |
| | | tactcggtcctggttgtggcgaaggttgagaagggcaagtccaagaagctcaagagcgtgaaggagc |
| | | tgctggggatcacgattatggagcgctccagcttcgagaagaacccgatcgatttcctggaggcgaa |
| | | gggctacaaggaggtgaagaaggacctgatcattaagctccccaagtactcactcttcgagctggag |
| | | gctgttcgtcgagcagcacaagcattacctcgacgagatcattgagcagatttccgagttctccaag |
| | | cgaacggcaggaagcggatgctggcttccgctggcgagctgcagaaggggaacgagctggctctgcc |
| | | gtccaagtatgtgaacttcctctacctggcctcccactacgagaagctcaagggcagccccgaggac |
| | | aacgagcagaagcacgtgatcctggccgacgcgaatctggataaggtcctctccgcgtacaacaagc |
| | | accgcgacaagccaatcagggagcaggctgagaatatcattcatctcttcaccctgacgaacctcgg |
| | | cgcccctgctgctttcaagtacttcgacacaactatcgatcgcaagaggtacacaagcactaaggag |
| | | gtcctggacgcgaccctcatccaccagtcgattaccggcctctacgagacgcgcatcgacctgtctc |
| | | agctcgggggcgac |
| 1500 | nucleoplasmin | aagcggccagcggcgacgaagaaggcggggcaggcgaagaagaagaag |
| | NLS (position | |
| | 7339-7386) | |
| 1501 | space | tgagctcagagctttcgttcgtatcatcggtttcgacaacgttcgtcaagttcaatgcatcagtttc |
| | (position 7387- | attgcgcacacaccagaatcctactgagtttgagtattatggcattgggaaaactgtttttcttgta |
| | 8067) | ccatttgttgtgcttgtaatttactgtgttttttattcggttttcgctatcgaactgtgaaatggaa |
| | | atggatggagaagagttaatgaatgatatggtccttttgttcattctcaaattaatattatttgttt |
| | | tttctcttatttgttgtgtgttgaatttgaaattataagagatatgcaaacattttgttttgagtaa |
| | | caaatgtgtcaaatcgtggcctctaatgaccgaagttaatatgaggagtaaaacacttgtagttgta |
| | | cccattatgcttattactaggcaacaaatatattttcagacctagaaaagctgcaaatgttactgaa |
| | | tacaagtatgtcctcttgtgttttagaatttatgaactttcctttatgtaattttccagaatccttg |
| | | tcagattctaatcattgctttataattatagttatactcatggatttgtagttgagtatgaaaatat |
| | | tttttaatgcattttatgacttgccaattgattgacaacgaattcgtaatcatggtcatagctgttt |
| | | cctgtgtgaaa |
| 1502 | lac operator | ttgttatccgctcacaa |
| | (position 8068- | |
| | 8084) | |
| 1503 | space | ttccaca |
| | (position 8085- | |
| | 8091) | |
| 1504 | lac promoter | caacatacgagccggaagcataaagtgtaaa |
| | (position 8092- | |
| | 8122) | |
| 1505 | space | gcctggggtgccta |
| | (position 8123- | |
| | 8136) | |
| 1506 | CAP binding | atgagtgagctaactcacatta |
| | site (position | |
| | 8137- 8158) | |
| 1507 | space | attgcgttgcgctcactgcccgctttccagtcgggaaacctgtcgtgccagctgcattaatgaatcg |
| | (position 8159- | gccaacgcgcggggagaggcggtttgcgtattggctagagcagcttgccaacatggtggagcacgac |
| | 8348) | actctcgtctactccaagaatatcaaagatacagtctcagaagaccaaagggctat |
| 1508 | CaMV 35S | tgagacttttcaacaaagggtaatatcgggaaacctcctcggattccattgcccagctatctgtcac |
| | promoter | ttcatcaaaaggacagtagaaaaggaaggtggcacctacaaatgccatcattgcgataaaggaaagg |
| | (enhanced) | ctatcgttcaagatgcctctgccgacagtggtcccaaagatggacccccacccacgaggagcatcgt |
| | (position 8349- | tggaaaaagaagacgttccaaccacgtctcaaagcaagtggattgatgtgataacatggtggagcac |
| | 9026) | gacactctcgtctactccaagaatatcaaagatacagtctcagaagaccaaagggctattgagactt |
| | | ttcaacaaagggtaatatcgggaaacctcctcggattccattgcccagctatctgtcacttcatcaa |
| | | aaggacagtagaaaaggaaggtggcacctacaaatgccatcattgcgataaaggaaaggctatcgtt |
| | | caagatgcctctgccgacagtggtcccaaagatggacccccacccacgaggagcatcgtggaaaaag |
| | | aagacgttccaaccacgtcttcaaagcaagtggattgatgtgatatctccactgacgtaagggatga |
| | | cgcacaatcccactatccttcgcaagaccttcctctatataaggaagttcatttcatttggagagga |
| | | cacgctga |
| 1509 | space | aatcaccagtctctctctacaaatctatctctctcgagtctacc |
| | (position 9027- | |
| | 9070) | |
| 1510 | BlpR | atgagcccagaacgacgcccggccgacatccgccgtgccaccgaggcggacatgccggcggtctgca |
| | (9071-9622) | ccatcgtcaaccactacatcgagacaagcacggtcaacttccgtaccgagccgcaggaaccgcagga |
| | | gtggacggacgacctcgtccgtctgcgggagcgctatccctggctcgtcgccgaggtggacggcgag |
| | | gtcgccggcatcgcctacgcgggcccctggaaggcacgcaacgcctacgactggacggccgagtcga |
| | | ccgtgtacgtctccccccgccaccagcggacgggactgggctccacgctctacacccacctgctgaa |
| | | gtccctggaggcacagggcttcaagagcgtggtcgctgtcatcgggctgcccaacgacccgagcgtg |
| | | cgcatgcacgaggcgctcggatatgccccccgcggcatgctgcgggcggccggcttcaagcacggga |
| | | actggcatgacgtgggtttctggcagctggacttcagcctgccggtaccgccccgtccggtcctgcc |
| | | cgtcaccgagatttga |
| 1511 | space | ctcgag |
| | (position 9623- | |
| | 9628) | |
| 1512 | CaMV | tttctccataataatgtgtgagtagttcccagataagggaattagggttcctatagggtttcgctca |
| | poly(A)signal | tgtgttgagcatataagaaacccttagtatgtatttgtatttgtaaaatacttctatcaataaaatt |
| | (position 9629- | tctaattcctaaaaccaaaatccagtactaaaatccagatc |
| | 9803 | |
| 1513 | space | ccccgaattaattcggcgttaattcagtacattaaaaacgtccgcaatgtgttattaagttgtctaa |
| | (position 9804- | gcgtcaattt |
| | 9880) | |
| 1514 | LB T-DNA | gtttacaccacaatatatcctgcca |
| | repeat (position | |
| | 9881-9905) | |
| 1515 | space | ccagccagccaacagctccccgaccggcagctcggcacaaaatcaccactcgatacaggcagcccat |
| | (position 9906- | cagtccgggacggcgtcagcgggagagccgttgtaaggcggcagactttgctcatgttaccgatgct |
| | 10329) | attcggaagaacggcaactaagctgccgggtttgaaacacggatgatctcgcggagggtagcatgtt |
| | | gattgtaacgatgacagagcgttgctgcctgtgatcaccgcggtttcaaaatcggctccgtcgatac |
| | | tatgttatacgccaactttgaaaacaactttgaaaaagctgttttctggtatttaaggttttagaat |
| | | gcaaggaacagtgaattggagttcgtcttgttataattagcttcttggggtatctttaaatactgta |
| | | gaaaagaggaaggaaataataa |
| 1516 | KanR | atggctaaaatgagaatatcaccggaattgaaaaaactgatcgaaaaataccgctgcgtaaaagata |
| | (position 10330- | cggaaggaatgtctcctgctaaggtatataagctggtgggagaaaatgaaaacctatatttaaaaat |
| | 11124) | gacggacagccggtataaagggaccacctatgatgtggaacgggaaaaggacatgatgctatggctg |
| | | gaaggaaagctgcctgttccaaaggtcctgcactttgaacggcatgatggctggagcaatctgctca |
| | | tgagtgaggccgatggcgtcctttgctcggaagagtatgaagatgaacaaagccctgaaaagattat |
| | | cgagctgtatgcggagtgcatcaggctctttcactccatcgacatatcggattgtccctatacgaat |
| | | agcttagacagccgcttagccgaattggattacttactgaataacgatctggccgatgtggattgcg |
| | | aaaactgggaagaagacactccatttaaagatccgcgcgagctgtatgattttttaaagacggaaaa |
| | | gcccgaagaggaacttgtcttttcccacggcgacctgggagacagcaacatctttgtgaaagatggc |
| | | aaagtaagtggctttattgatcttgggagaagcggcagggcggacaagtggtatgacattgccttct |
| | | gcgtccggtcgatcagggaggatatcggggaagaacagtatgtcgagctattttttgacttactggg |
| | | gatcaagcctgattgggagaaaataaaatattatattttactggatgaattgttttag |
| 1517 | space | tacctagaatgcatgaccaaaatcccttaacgtgagttttcgttccactgagcgtcagaccccgtag |
| | (position 11125- | aaaagatcaaaggatcttc |
| | 11210 | |
| 1518 | ori | ttgagatcctttttttctgcgcgtaatctgctgcttgcaaacaaaaaaaccaccgctaccagcggtg |
| | (position 11211- | gtttgtttgccggatcaagagctaccaactctttttccgaaggtaactggcttcagcagagcgcaga |
| | 11799) | taccaaatactgtccttctagtgtagccgtagttaggccaccacttcaagaactctgtagcaccgcc |
| | | tacatacctcgctctgctaatcctgttaccagtggctgctgccagtggcgataagtcgtgtcttacc |
| | | gggttggactcaagacgatagttaccggataaggcgcagcggtcgggctgaacggggggttcgtgca |
| | | cacagcccagcttggagcgaacgacctacaccgaactgagatacctacagcgtgagctatgagaaag |
| | | cgccacgcttcccgaagggagaaaggcggacaggtatccggtaagcggcagggtcggaacaggagag |
| | | cgcacgagggagcttccagggggaaacgcctggtatctttatagtcctgtcgggtttcgccacctct |
| | | gacttgagcgtcgatttttgtgatgctcgtcaggggggcggagcctatggaaa |
| 1519 | space | aacgccagcaacgcggcctttttacggttcctggccttttgctggccttttgctcacatgttctttc |
| | (position 11800- | ctgcgttatcccctgattctgtggataaccgtattaccgcctttgagtgagctgataccgctcgccg |
| | 11984) | cagccgaacgaccgagcgcagcgagtcagtgagcgaggaagcggaagagcg |
| 1520 | bom | cctgatgcggtattttctccttacgcatctgtgcggtatttcacaccgcatatggtgcactctcagt |
| | (position 11985- | acaatctgctctgatgccgcatagttaagccagtatacactccgctatcgctacgtgactgggtcat |
| | 12125) | ggctgcg |
| 1521 | space | ccccgacacccgccaacacccgctgacgcgccctgacgggcttgtctgctcccggcatccgcttaca |
| | (position 12126- | gacaagctgtgaccgtctccgggagctgcatgtgtcagaggttttcaccgtcatcaccgaaacgcgc |
| | 12468) | gaggcagggtgccttgatgtgggcgccggcggtcgagtggcgacggcgcggcttgtccgcgccctgg |
| | | tagattgcctggccgtaggccagccatttttgagcggccagcggccgcgataggccgacgcgaagcg |
| | | gcggggcgtagggagcgcagcgaccgaagggtaggcgctttttgcagctcttcggctgtgcgctggc |
| | | cagacagt |
| 1522 | pVS1 oriV | tatgcacaggccagggggttttaagagttttaataagttttaaagagttttaggcggaaaaatcgcc |
| | (position 12469- | ttttttctcttttatatcagtcacttacatgtgtgaccggttcccaatgtacggctttgggttccca |
| | 12663) | atgtacgggttccggttcccaatgtacggctttgggttcccaatgtacgtgctatccaca |
| 1523 | space | ggaaacagaccttttcgacctttttcccctgctagggcaatttgccctagcatctgctccgtaca |
| | (position 12664- | |
| | 12728) | |
| 1524 | pVS1 RepA | ttaggaaccggcggatgcttcgccctcgatcaggttgcggtagcgcatgactaggatcgggccagcc |
| | (position 12729- | tgccccgcctcctccttcaaatcgtactccggcaggtcatttgacccgatcagcttgcgcacggtga |
| | 13802) | aacagaacttcttgaactctccggcgctgccactgcgttcgtagatcgtcttgaacaaccatctggc |
| | | gttctgccttgcctgcggcgcggcgtgccagcggtagagaaaacggccgatgccgggatcgatcaaa |
| | | aagtaatcggggtgaaccgtcagcacgtccgggttcttgccttctgtgatctcgcggtacatccaat |
| | | cagctagctcgatctcgatgtactccggccgcccggtttcgctctttacgatcttgtagcggctaat |
| | | caaggcttcaccctcggataccgtcaccaggcggccgttcttggccttcttcgtacgctgcatggca |
| | | acgtgcgtggtgtttaaccgaatgcaggtttctaccaggtcgtctttctgctttccgccatcggctc |
| | | cgccggcagaacttgagtacgtccgcaacgtgtggacggaacacgcggccgggcttgtctcccttcc |
| | | cttcccggtatcggttatggattcggttagatgggaaaccgccatcagtaccaggtcgtaatcccac |
| | | acactggccatgccggccggccctgcggaaacctctacgtgcccgtctggaagctcgtagcggatca |
| | | cctcgccagctcgtcggtcacgcttcgacagacggaaaacggccacgtccatgatgctgcgactatc |
| | | gcgggtgcccacgtcatagagcatcggaacgaaaaaatctggttgctcgtcgcccttgggcggcttc |
| | | ctaatcgacggcgcaccggctgccggcggttgccgggattctttgcggattcgatcagcggccgctt |
| | | gccacgattcaccggggcgtgcttctgcctcgatgcgttgccgctgggcggcctgcgcggccttcaa |
| | | cttctccaccaggtcatcacccagcgccgcgccgatttgtaccgggccggatggtttgcgaccgctc |
| | | ac |
| 1525 | space | gccgattcctcgggcttgggggttccagtgccattgcagggccggcagacaacccagccgcttacgc |
| | (position 13803- | ctggccaaccgcccgttcctccacacatggggcattccacggcgtcggtgcctggttgttcttgatt |
| | 14230) | ttccatgccgcctcctttagccgctaaaattcatctactcatttattcatttgctcatttactctgg |
| | | tagctgcgcgatgtattcagatagcagctcggtaatggtcttgccttggcgtaccgcgtacatcttc |
| | | agcttggtgtgatcctccgccggcaactgaaagttgacccgcttcatggctggcgtgtctgccaggc |
| | | tggccaacgttgcagccttgctgctgcgtgcgctcggacggccggcacttagcgtgtttgtgctttt |
| | | gctcattttctctttacctcattaac |
| 1526 | pVS1 StaA | tcaaatgagttttgatttaatttcagcggccagcgcctggacctcgcgggcagcgtcgccctcgggt |
| | (position 14231- | tctgattcaagaacggttgtgccggcggcggcagtgcctgggtagctcacgcgctgcgtgatacggg |
| | 14860) | actcaagaatgggcagctcgtacccggccagcgcctcggcaacctcaccgccgatgcgcgtgccttt |
| | | gatcgcccgcgacacgacaaaggccgcttgtagccttccatccgtgacctcaatgcgctgcttaacc |
| | | agctccaccaggtcggcggtggcccatatgtcgtaagggcttggctgcaccggaatcagcacgaagt |
| | | cggctgccttgatcgcggacacagccaagtccgccgcctggggcgctccgtcgatcactacgaagtc |
| | | gcgccggccgatggccttcacgtcgcggtcaatcgtcgggcggtcgatgccgacaacggttagcggt |
| | | tgatcttcccgcacggccgcccaatcgcgggcactgccctggggatcggaatcgactaacagaacat |
| | | cggccccggcgagttgcagggcgcgggctagatgggttgcgatggtcgtcttgcctgacccgccttt |
| | | ctggttaagtacagcgataaccttcat |
| 1527 | space | gcgttccccttgcgtatttgtttatttactcatcgcatcatatacgcagcgaccgcatgacgcaagc |
| | (position 14861- | tgttttactcaaatacacatcacctttttagacggcggcgctcggtttcttcagcggccaagctggc |
| | 16139) | cggccaggccgccagcttggcatcagacaaaccggccaggatttcatgcagccgcacggttgagacg |
| | | tgcgcgggcggctcgaacacgtacccggccgcgatcatctccgcctcgatctcttcggtaatgaaaa |
| | | acggttcgtcctggccgtcctggtgcggtttcatgcttgttcctcttggcgttcattctcggcggcc |
| | | gccagggcgtcggcctcggtcaatgcgtcctcacggaaggcaccgcgccgcctggcctcggtgggcg |
| | | gtcacttcctcgctgcgctcaagtgcgcggtacagggtcgagcgatgcacgccaagcatgcagccgc |
| | | ctctttcacggtgcggccttcctggtcgatcagctcgcgggcgtgcgcgatctgtgccggggtgagg |
| | | gtagggcgggggccaaacttcacgcctcgggccttggcggcctcgcgcccgctccgggtgcggtcga |
| | | tgattagggaacgctcgaactcggcaatgccggcgaacacggtcaacaccatgcggccggccggcgt |
| | | ggtggtgtcggcccacggctctgccaggctacgcaggcccgcgccggcctcctggatgcgctcggca |
| | | atgtccagtaggtcgcgggtgctgcgggccaggcggtctagcctggtcactgtcacaacgtcgccag |
| | | ggcgtaggtggtcaagcatcctggccagctccgggcggtcgcgcctggtgccggtgatcttctcgga |
| | | aaacagcttggtgcagccggccgcgtgcagttcggcccgttggttggtcaagtcctggtcgtcggtg |
| | | ctgacgcgggcatagcccagcaggccagcggcggcgctcttgttcatggcgtaatgtctccggttct |
| | | agtcgcaagtattctactttatgcgactaaaacacgcgacaagaaaacgccaggaaaagggcagggc |
| | | ggcagcctgtcgcgtaacttaggacttgtgcgacatgtcgttttcagaagacggctgcactgaacgt |
| | | cagaagccgactgcactatagcagcggaggggttggatcaaagtactttgatcccgaggggaaccct |
| | | gtggttggcatgcacatacaaatggacgaacggataaaccttttcacgcccttttaaatatccgtta |
| | | ttctaa |

### Example 2: Methods of Preparing Genetically Edited Cells

[0127] This example further illustrates a non-limiting example of methods of preparing a genetically edited cell as described in FIG. 6A, which depicts a scheme of the plasmid comprising a sequence encoding DNA nuclease (CRISPR associated nuclease-Cas9) and one single guide RNA (sgRNA) which direct the nuclease activity to specific sites of the DNA. The donor DNA comprising the endogenous or exogenous acid nucleic to be inserted into the intron can be delivered by B) a plasmid donor containing two specific sites (S1) of cleavage by Cas9. The two sites S1 are the same present in the intron, thus the co-cleavage occurs in the plasmid donor to lead the donor DNA fragment. The details of both plasmid in A) and B) are described in Example 1.

[0128] In another approach, the donor DNA is delivered as C) a blunt linear double-stranded oligodeoxynucleotide (dsODN), or D) a chemically modified dsODN (dsODN-CM) which is flanked by two additional nucleotides with phosphorothioate linkages at the 5′- and 3′-ends of both DNA strands and contain a phosphorylation at the 5′ end of both strand of the exogenous nucleic acid. In another approach, the donor DNA is delivered as a E) a blunt single-stranded oligodeoxynucleotide (ssODN).

[0129] Further, F) illustrates schematics of targeted integration of donor DNA containing exogenous nucleic acid into an intron of a gene. The genomic region shows the endogenous promoter (grey box), Exon 1, and Exon 2 (black box) separated by the intron 1 (double lines in grey representing double-strand DNA). The specific site for sgRNA-Cas9 recognition is shown as S1. The 5′splice site GU and 3′splice site AG are shown bearing the intron 1 region. G) The CRISPR-Cas9 system delivered by plasmid as described in Example 1 recognizes the specific site S1 and cleave the double strand of DNA into the intronic region. The donor DNA is inserted into the intron via non-homologous end-joining by the natural DNA repair system present in the cell. After splicing, the natural function of the H) gene and I) protein is preserved.

[0130] The other product of splicing is the intronic region containing the endogenous or exogenous nucleic acid, which can be the amiRNA or the coding region of a small peptide. J) The precursor of amiRNA is processed to a mature miRNA and delivered to target the desired trait. K) The intron that comprises a coding region of a small peptide is a template for ribosome machinery binding and is translated into a small peptide with regulatory functions.

### Example 3: Endogenous or Exogenous Nucleic Acids Encoding miRNAs

[0131] In FIG. 7, A) depicts a scheme of the construct comprising the components to express transiently the cassette containing the amiRNA specific for a reporter gene (amiRNA-Reporter). The cassette comprises the first exon (E1), first intron containing the amiRNA-Reporter, and the second exon (E2) of a gene highly and constitutively expressed selected from Table 1 and Table 2. In this example, ACTIN 1 (SEQ ID NO: 1) from rice of Table 1 and Table 2 is used. The amiRNA-Reporter is inserted at the position described in Table 3 and Table 4 (within SEQ ID NO: 1291). B) depicts a scheme of the plasmid comprising the cassette of the reporter gene overexpression. The reporter gene is driven by a strong promoter commonly used for dicotyledons transient overexpression. The reporter gene is targeted by the amiRNA-Reporter in a specific region. Further, C) both first and second plasmids are used to transform Nicotiana benthamiana leaf via Agroinfiltration. D) the transient co-expression of both the gene highly expressed selected to receive the insertion of the amiRNA-Reporter, the further processed amiRNA-Reporter, and the Reporter gene, were followed and quantified to evaluate: 1) the native protein encoded by the gene selected to receive the insertion of the amiRNA-Reporter in its intron; 2) the presence/stability of amiRNA-Reporter after splicing event; 3) the silencing of the reporter gene target by the amiRNA-Reporter. Techniques for evaluations include Real-time RT-qPCR (qPCR), nucleic acid sequencing, western blotting (WB), ELISA, and phenotype of the leaf (e.g. color or fluorescence).

### Example 4: Exemplary Experiment of Nicotiana benthamiana Leaves Agroinfected with an Agrobacterium Strain Harboring Plasmids

[0132] This example further illustrates a non-limiting example of methods of preparing a genetically edited cell as schematically described in FIG. 8. A) The top right leaf quadrant shows the Agroinfection with a control reporter construct. The expression of the reporter gene was visually observed. The top left leaf quadrant shows the co-Agroinfection with both the control reporter construct and a construct comprising an amiRNA (SEQ ID NO: 1532) designed to silence the reporter gene (positive control). The expression of the reporter gene was, visually, completely abolished. The bottom left leaf quadrant shows the co-Agroinfection with both the control reporter construct and a construct comprising an amiRNA (SEQ ID NO:1532) designed to silence the reporter gene inserted into the intron 2 of the rice ACTIN gene (SEQ ID NO: 278). The expression of the reporter gene was, visually, completely abolished. The bottom right leaf quadrant shows the co-Agroinfection with the control reporter construct and a construct comprising an amiRNA (SEQ ID NO: 1532) designed to silence the reporter gene inserted into the intron 2 of the soybean ACTIN gene (SEQ ID NO: 533). The expression of the reporter gene was, visually, completely abolished. B) The amiRNA designed to silence the reporter gene accumulated in the bottom left and bottom right leaf quadrants indicating that the amiRNA inserted into the intron 2 of the actin genes from rice (SEQ ID NO: 1) and soybean (SEQ ID NO: 21) was correctly processed, as determined by qPCR. C) The mRNA transcribed from the reporter gene were targeted and degraded by the amiRNA inserted into the intron 2 of the actin genes from rice and soybean, as determined by qPCR. D) After transcription, splicing, amiRNA processing a mature ACTIN mRNA was produced. After translation, the correct, native ACTIN protein encoded by the rice and the soybean actin genes (SEQ ID NO: 1 and SEQ ID NO: 21, respectively) was produced, as shown by SDS-PAGE.

### Example 5: Endogenous or Exogenous Nucleic Acids Encoding Small Peptide

[0133] FIG. 9A) depicts a scheme of the plasmid comprising the elements to express transiently the cassette containing small peptide coding sequence. The cassette comprises the first exon (E1), first intron containing the small peptide coding sequence, and the second exon (E2) of a gene highly and constitutively expressed selected from Table 1 and Table 2. ACTIN 1 from rice of Table 1 and Table 2 is used. The small peptide coding sequence is inserted at the position described in Table 3 and Table 4. B) the plasmid is used to transform Nicotiana benthamiana leaf, via Agroinfiltration. Further, C) the transient expression of the small peptide and its effect in the cell is followed and quantified to evaluate: 1) the presence/stability of the small peptide after splicing event and eventual post-translational modification; 2) the effect of the overexpression of the small peptide in its related pathway (e.g. quantification of some target downstream of the hormone signaling pathway). Techniques for evaluations include Real-time RT-qPCR (qPCR), mass spectrometry (MS/MS), western blotting (WB), ELISA, and phenotype of the leaf (e.g. color or fluorescence).

### Example 6: Genetically Edited Plants with Desirable Traits

[0134] In FIG. 10, A) depicts a scheme of the genomic region of an endogenous gene from the model plant Arabidopsis. The exons are represented by grey boxes, the intronic regions are along the line bearing each grey box. The amiRNA specific for the target exemplified by a reporter gene (amiRNA-Reporter) is inserted in the intron 6, an intronic region between exon 6 and exon 7. The insertion is by CRISPR-Cas9 and non-homologous end join system (NHEJ), at the specific position exemplified in Table 3 and Table 4. Primers forward (P1) and reverse (P2) are designed to amplify the region of insertion followed by sequencing, to verify the insertion. B) The natural function of the gene comprising the insertion of the amiRNA-Reporter is evaluated by quantifying the mature mRNA and its protein. The presence of mature amiRNA-Reporter is also quantified. C) A previously obtained transgenic Arabidopsis thaliana overexpressing the Reporter (CaMV 35S: Reporter) is the host of the gene editing described in A) and B).

[0135] As shown in FIG. 10, the transgenic CaMV 35S: Reporter plant presents red color and when engineered with amiRNA-Reporter is expected to rescue the natural green color. The transgenic CaMV 35S: Reporter plant not engineered with amiRNA-Reporter do not contain the desirable trait of rescuing natural green color). Techniques for evaluations include Real-time RT-qPCR (qPCR), sequencing, western blotting (WB), Elisa, and phenotype of the plant (e.g. color). Some examples of reporter genes are GFP, RFP, anthocyanin, β-glucoronidase (GUS).

[0136] This example illustrates that the engineered plant exhibits a desirable trait as compared to a non-engineered plant.

[0137] The preceding merely illustrates the principles of this disclosure. It will be appreciated that those skilled in the art will be able to devise various arrangements which, although not explicitly described or shown herein, embody the principles of the invention and are included within its spirit and scope. Furthermore, all examples and conditional language recited herein are principally intended to aid the reader in understanding the principles of this disclosure and the concepts contributed by the inventors to furthering the art and are to be construed as being without limitation to such specifically recited examples and conditions. Moreover, all statements herein reciting principles, aspects, and embodiments of the invention as well as specific examples thereof, are intended to encompass both structural and functional equivalents thereof. Additionally, it is intended that such equivalents include both currently known equivalents and equivalents developed in the future, i.e., any elements developed that perform the same function, regardless of structure. The scope of the present disclosure, therefore, is not intended to be limited to the exemplary embodiments shown and described herein. Rather, the scope and spirit of the present disclosure is embodied by the appended claims.

1. A system comprising a first nucleic acid sequence comprising a nucleic acid encoding a ribonucleic acid or a peptide, a second nucleic acid sequence comprising a sequence encoding a DNA nuclease, and a third nucleic acid sequence comprising a sequence encoding a guide RNA, wherein the guide RNA is complementary to a non-coding region of the genome of a cell.

2. The system of claim 1, wherein the nucleic acid encodes the ribonucleic acid, and the ribonucleic acid specifically binds to (i) a target nucleic acid of Table 6, (ii) a target nucleic acid present in a pest of Table 6, (iii) a target nucleic acid of an organism of Table 6, (iv) a target nucleic exogenous or endogenous to the cell, (v) a target nucleic acid responsible for water acquisition, nutrient acquisition, disease control, or pest control, or any combination of two or more thereof, in the cell, (vi) a target nucleic acid comprises a regulatory element involved in: plant growth and development, yield, biotic stress, abiotic stress, or herbicide resistance, or any combination of two or more thereof, (vii) a target nucleic acid of an insect, bacteria, fungi, or worm, or a combination of two or more thereof, that is harmful to the cell, (viii) a target nucleic acid of an organism that causes a disease to the cell, or (ix) a combination of two or more of (i) to (viii).

3. (canceled)

4. The system of claim 1, wherein the nucleic acid encodes the peptide, and the peptide is (i) a peptide selected from Table 7, (ii) a peptide encoded by an mRNA sequence at least 80%, 81%, 82%, 83%, 84%, 85%, 86%, 87%, 88%, 89%, 90%, 91%, 92%, 93%, 94%, 95%, 96%, 97%, 98%, or 99% identical to a sequence of Table 8, (iii) a peptide that affects hormonal regulation, protection against a pathogen, protection against an insect, nitrogen fixation, nutrient acquisition, immunity induction, biotic stress, or abiotic stress, or a combination of two or more thereof, in the cell, or (iv) a combination of two or more of (i) to (iii).

5. (canceled)

6. The system of claim 1, wherein the non-coding region is positioned within, or adjacent to, a gene of the cell selected from actin, ubiquitin, ribosomal gene, gene encoding a heat shock protein, rubisco, tubulin, TMM, FAMA, rbc-S, CAB2, Rac, GLP, PDX1, BiGSSP, Lhca3, SMB, GATA23, ARF, SIREO, Prx, TIP2, ET304, TobRB7, and a gene selected from Table 1.

7.-16. (canceled)

17. A method of inserting the nucleic acid encoding the ribonucleic acid or the peptide into the non-coding region of the cell, the method comprising introducing the system of claim 1 into the cell.

18.-19. (canceled)

20. A cell comprising a recombinant nucleic acid comprising a coding region and a non-coding region, wherein the non-coding region comprises a nucleic acid exogenous to the non-coding region, and wherein the coding region is the coding region of a gene, and the gene (i) is actin, ubiquitin, ribosomal gene, gene encoding a heat shock protein, rubisco, tubulin, TMM, FAMA, rbc-S, CAB2, Rac, GLP, PDX1, BiGSSP, Lhca3, SMB, GATA23, ARF, SIREO, Prx, TIP2, ET304, TobRB7, or a gene selected from Table 1; (ii) accounts for about 1% to about 20% of gene expression in the cell; (iii) is transcribed from a constitutive promoter, optionally wherein the promoter is specific or a plant organ or tissue, further optionally wherein the organ or tissue comprises a root, stem, fruit, seed, leaf, ground tissue, vascular tissue, or dermal tissue, or a combination of two or more thereof; or (iv) a combination of two or more of (i) to (iii).

21. The cell of claim 20, wherein the non-coding region comprises (i) an intron positioned between a first exon region of the coding region and a second exon region of the coding region, (ii) a 5′ non-coding region positioned adjacent to the coding region, or (iii) a 3′ non-coding region positioned adjacent to the coding region.

22. The cell of claim 20, wherein the gene encodes mRNA endogenous to the cell, and after transcription of the gene and mRNA splicing, the mRNA is translated into a protein endogenous to the cell.

23. (canceled)

24. The cell of claim 20, wherein the nucleic acid exogenous to the non-coding region encodes a ribonucleic acid or a peptide, and (a) wherein the nucleic acid encodes the ribonucleic acid, and the ribonucleic acid specifically binds to (i) a target nucleic acid of Table 6, (ii) a target nucleic acid present in a pest of Table 6, (iii) a target nucleic acid of an organism of Table 6, (iv) a target nucleic exogenous or endogenous to the cell, (v) a target nucleic acid responsible for water acquisition, nutrient acquisition, disease control, or pest control, or any combination of two or more thereof, in the cell, (vi) a target nucleic acid comprises a regulatory element involved in: plant growth and development, yield, biotic stress, abiotic stress, or herbicide resistance, or any combination of two or more thereof, (vii) a target nucleic acid of an insect, bacteria, fungi, or worm, or a combination of two or more thereof, that is harmful to the cell, (viii) a target nucleic acid of an organism that causes a disease to the cell, or (ix) a combination of two or more of (i) to (viii); or (b) wherein the nucleic acid encodes the peptide, and the peptide is (i) a peptide selected from Table 7, (ii) a peptide encoded by an mRNA sequence at least 80%, 81%, 82%, 83%, 84%, 85%, 86%, 87%, 88%, 89%, 90%, 91%, 92%, 93%, 94%, 95%, 96%, 97%, 98%, or 99% identical to a sequence of Table 8, (iii) a peptide that affects hormonal regulation, protection against a pathogen, protection against an insect, nitrogen fixation, nutrient acquisition, immunity induction, biotic stress, or abiotic stress, or a combination of two or more thereof, in the cell, or (iv) a combination of two or more of (i) to (iii).

25.-31. (canceled)

32. The cell of claim 20, wherein the nucleic acid exogenous to the non-coding region is about 10 to about 700 bases in length, or about less than 200 bases in length.

33. A cell comprising a recombinant nucleic acid comprising a coding region and a non-coding region, wherein the non-coding region comprises a nucleic acid exogenous to the non-coding region, and wherein the nucleic acid exogenous to the non-coding region encodes a ribonucleic acid that specifically binds to (i) a target nucleic acid of Table 6, (ii) a target nucleic acid present in pest of Table 6, (iii) a target nucleic acid of an organism of Table 6, (iv) a target nucleic exogenous or endogenous to the cell, (v) a target nucleic acid responsible for water acquisition, nutrient acquisition, disease control, or pest control, or any combination of two or more thereof, in the cell, (v) a target nucleic acid comprises a regulatory element involved in: plant growth and development, yield, biotic stress, abiotic stress, or herbicide resistance, or any combination of two or more thereof, (vi) a target nucleic acid of an insect, bacteria, fungi, or worm (e.g., larva of the insect, and nematode), or a combination of two or more thereof, that is harmful to the cell, (vii) a target nucleic acid of an organism that causes a disease to the cell, or (viii) a combination of two or more of (i) to (vii).

34.-36. (canceled)

37. The cell of claim 33, wherein the non-coding region is positioned within, or adjacent to, a gene of the cell, wherein the gene is actin, ubiquitin, ribosomal gene, gene encoding a heat shock protein, rubisco, tubulin, TMM, FAMA, rbc-S, CAB2, Rac, GLP, PDX1, BiGSSP, Lhca3, SMB, GATA23, ARF, SIREO, Prx, TIP2, ET304, TobRB7, or a gene selected from Table 1.

38.-39. (canceled)

40. The cell of claim 33, wherein the recombinant nucleic acid is positioned within the genome of the cell.

41. The cell of claim 20, wherein the cell is a plant cell, and optionally the plant is a plant of Table 9, and further optionally the plant cell is a ground tissue cell, a vascular tissue cell, or a dermal tissue cell.

42.-43. (canceled)

44. The plant of claim 41, wherein the plant is resistant or more resistant to a pest, disease, or chemical, or a combination of two or more thereof, as compared to a plant that does comprise the cell with the recombinant nucleic acid.

45. The plant of claim 41, wherein the plant has an improved nutritional quality, increased crop yield, more efficient nutrient acquisition, or more efficient photosynthetic efficiency, or a combination of two or more thereof, as compared to a plant that does not comprise the cell with the recombinant nucleic acid.

46. A seed of the plant of claim 41.

47. A method of reducing or eliminating expression of a target gene in the cell of claim 20, the method comprising introducing into the non-coding region of the cell the nucleic acid exogenous to the non-coding region, wherein nucleic acid exogenous to the non-coding region encodes for a sequence that binds to mRNA of the target gene, thereby reducing or eliminating expression of the target gene.

48. A method of regulating a target gene or peptide in the cell of any claim 20, the method comprising introducing into the non-coding region of the cell the nucleic acid exogenous to the non-coding region, wherein the nucleic acid exogenous to the non-coding region encodes for an amino acid sequence that is capable of regulating the target gene or peptide in the cell, thereby regulating the target gene or peptide in the cell.

49. A method of introducing, increasing, or reducing a trait in the plant of claim 43, the method comprising introducing into the non-coding region of the cell of the plant the nucleic acid exogenous to the non-coding region, wherein: the nucleic acid exogenous to the non-coding region encodes for a sequence that binds to mRNA of a target gene, thereby introducing, increasing, or reducing the trait in the plant, or the nucleic acid exogenous to the non-coding region encodes an amino acid sequence that regulates a target gene or peptide in the cell, thereby introducing, increasing or reducing the trait in the plant.

50. (canceled)

The application's sequence listing, which the Patent Office published only in electronic form, follows.

SEQUENCE LISTING (1531 sequences)

SEQ ID NO: 1 - DNA, 1878 bp, Oryza sativa
  source 1..1878: mol_type = genomic DNA
tagtagctagcataagatggctgacgccgaggatatccagcccctcgtctgcgataatggaactggtatggtcaaggtaagctgtttggatctcagggtggtttccgtttaccgaaatgctgcatttcttggtagcaaaactgaggtggtttgtgtcaggctgggttcgccggagatgatgcgcccagggctgtcttccccagcattgtcggccgccctcgccacaccggtgtcatggtcggaatgggccagaaggacgcctacgtcggcgacgaggcgcagtccaagaggggtatcttgaccctcaagtaccccatcgagcatggtatcgtcagcaactgggatgatatggagaagatctggcatcacaccttctacaacgagctccgtgtggccccggaggagcaccccgtcctcctcaccgaggctcctctcaaccccaaggccaatcgtgagaagatgacccagatcatgtttgagaccttcaacacccctgctatgtacgtcgccatccaggccgtcctctctctgtatgccagtggtcgtaccacaggtgagcacattcgacactgaactaaaaggctgtgaggatgaattttaattttgacattcacatgtagatgagatttagttctgcaatcttcaattgtcatacagcaagactatataatagctttcaaaataaaatcataggcagttctcataaatggaatcatgtttgaacatcctaattctgttggcatggagtgctttgacattttgatgtgctacagttgtgaataactgaatttccttttcccaggtattgtgttggactctggtgatggtgtcagccacactgtccccatctatgaaggatatgctctcccccatgctatccttcgtctcgaccttgctgggcgtgatctcactgattacctcatgaagatcctgacggagcgtggttactcattcaccacaacggccgagcgggaaattgtgagggacatgaaggagaagctttcctacatcgccctggactatgaccaggaaatggagactgccaagaccagctcctccgtggagaagagctacgagcttcctgatggacaggttatcaccattggtgctgagcgtttccgctgccctgaggtcctcttccagccttccttcataggaatggaagctgcgggtatccatgagactacatacaactccatcatgaagtgcgacgtggatattaggaaggatctatatggcaacatcgttctcagtggtggtaccactatgttccctggcattgctgacaggatgagcaaggagatcactgccttggctcctagcagcatgaagatcaaggtggtcgcccctcctgaaaggaagtacagtgtctggattggaggatccatcttggcatctctcagcacattccagcaggtaaatatacaaatgcagcaatgtagtgtgtttacctcatgaacttgatcaatttgcttacaatgttgcttgccgttgcagatgtggattgccaaggctgagtacgacgagtctggcccatccattgtgcacaggaaatgcttctaattcttcggacccaagaatgctaagccaagaggagctgttatcgccgtcctcctgcttgtttctctctttttgttgctgtttcttcattagcgtggacaaagttttcaaccggcctatctgttatcattttcttctattcaaagactgtaatacctattgctacctgtggttctcacttgtgattttggacacatatgttcggtttattcaaatttaatcagatgcctgatgagggtaccagaaaaaatacgtgttctggttgtttttgagttgcgattattctatgaaatgaataacatcgaagttatcatccca

SEQ ID NO: 2 - DNA, 2493 bp, Oryza sativa
  source 1..2493: mol_type = genomic DNA
gataaaggcaggtgtagtggagtatctatcttcccaccttggcgtaaaagaaaagaaaatctgcagtctgtgtcgtctcctccggtccttgcgcgcaagaccgagtcgcggctgccgatctccatctgccgatcgagcagagcatagcaggggatcctggtaagcatccacatcctctttctttctcagaattcatctatctctttctggggatctggaatttgcttgcgttcattaaccctagcttctcttctagactagatctggaagaagctcttggatctcttagttccagagccttaaccttagtacaagtagcacttcgtttgttccccaaaagttggatccgcccctgcgagttttgtggtttttccgggtgcaaactagtatagtagagcttaagaaatgaagtactcatcaatgatttagttgaagaaatgcgtcgtcgtcgagttgtatagcaacaatgatcaggcactactacttgttaaagtattaactctctgcagctcttctgtaggaaatggctgacggtgaggacatccagcctcttgtctgtgacaatggcactggaatggtcaaggtctgattttctttttcttttttactcttacgtaatgtaatgtatgtcgtctcctgctgaatattacattacattacatttcatcatgtaggctggtttcgctggggatgatgcaccaagggccgtgttccctagtattgttggccgtcctcgccacaccggtgttatggtaggaatggggcagaaggatgcctatgttggtgatgaggcacagtccaagagaggtatcctcacgctcaagtaccccatcgagcacggtatcgtgagcaactgggatgacatggagaaaatctggcatcacactttctacaatgagcttcgtgtggcgcccgaggagcaccctgtgttgctcactgaagctcctctgaaccctaaagccaacagagagaagatgacccagattatgtttgagactttcaatgtccctgcaatgtacgtcgctatccaggccgtgctttccctctatgccagtggccgtactactggtatgtatgaactcatctctgtcttttacttcaatgaggagggtttgctcaattatgcacttgtatgatccacctctgctgccatacacttttttttaatcattgccaagcttctacaattaatgtatgatttgcatccatctttattaatatgctcatttgctagcatcctttagatacacttcaatcttgatataaatgttttatttggatacacttcaatcttgatagcaagctacctgcgaccccattgtgtccaggcctgaacaaacagctaactgtcgacaagtaaatgttttatttagaggagcttatgtttctctgctctgcaggtattgttcttgattctggtgatggtgtcagccacacagtgcccatttatgaaggatatgcgcttcctcatgccattctccgtttggatctggctggtcgtgacctcacagactcccttatgaagattctgactgagaggggttactccttcacaacctccgctgagcgggaaattgtaagggacatcaaggagaaacttgcgtatgttgcccttgattatgagcaagagttggaaaccgccaagaacagctcctcagttgaaaagagttatgagctacctgatggtcaagtaatcacaattggtgcagagaggttcaggtgccccgaggtcctcttccagccatccatgatcggtatggaggctgctggtattcacgagaccacctacaactccatcatgaagtgcgacgtggatatcaggaaggacctttatggcaacattgtgctcagtggtggtacaaccatgttcccaggcattgctgatcgtatgagcaaggagatcactgcccttgccccgagcagcatgaagattaaggtcgttgctccacctgagcgcaagtacagcgtctggatcggagggtcgatcctagcctcactcagcactttccaacaggtaggaagctcctgttcatctgtagttgctacaataattgttaaactttactttctggaacatatgtctcatgattaacctgtggtaacatctaaaatctgttgtatgtcgtgttggtttgcagatgtggatatcaaaggacgagtacgacgaatctggcccagcaattgtccacaggaaatgcttctgattttctcaagtgctctgctcttgtcatctgtagtatcgagttatgtttgattcgtttttctagcgatgtattggagatttgcaggctatgtttgttttctttttggagacgacttctctatgtgttcgatcagtgtaagaatgtcctatgtttgtgtcatctcagattgtttgtttgagttcacttgtcaaacttggttcgtttgattggtcagaactgtctgtatgagcttattgttctatacattgctccaagggtataattatgttaaattttggatctatttcaa

SEQ ID NO: 3 - DNA, 2497 bp, Oryza sativa
  source 1..2497: mol_type = genomic DNA
aggaacccccctctcttctcttatctacccctccccctccccccctcgactccgcgtcgactccactctcgcctcctcgcgactcggagttcaccgccgccaccgcctccgccgccgatctccccgtcccgccgcgccgccgccaccgtcctccctcctccggccgcatccccggtgagcatccatctgcgtgtcctcttcctcatctctccctccccacgcacgcacgcacgtactcgtagcttctgttcactgttctagatctggatacttttcgcttcattcgccttattaaaccttgatgctggtagcagtttgtttgtttgtgtttttttccccgcgcgcaaaaaatgtttgtggggggtggaactgaatcacatgctccacgtctagatccgccacctgagtttgccttgcatcacggtttagtgcttgattctttgtgcgcggttgattatcgcgtactctttttgctctacaagttctagatctcggtgtgtcggactatcgatatgtagttttgcatattctgttttgttttctgttcgctgcaagttttgatgtgccaaatattagcagttgatcttttgagattttgatttcctggagggtttgcgtctagtttctgttggaaaatggccatttcgtgacgtgttgcggcgcatgcctgttgttctgtttttgcgtcaggaattcagaaccagtaggaggaaatggctgacggcgaggacatccagccccttgtgtgtgacaatggaactggcatggtcaaggttcgtggtgctcattcgtagtatttctttgtagcagttatccccatgtttatgtgatttaatcgtatactttacttttcttgcgaattgctggcaggctgggtttgctggggacgatgcgcccagggctgttttccctagtatcgtggggcgcccccgtcacaccggtgtgatggttggtatggggcagaaggatgcctatgttggtgatgaggcgcagtccaagagaggtatcctcaccttgaagtacccgatcgagcatggtattgttagcaactgggatgacatggagaagatctggcatcacaccttctacaacgagctccgtgtcgcgcccgaggagcaccctgtgttgctgactgaggccccgctcaaccccaaggctaacagggagaagatgacccagatcatgtttgagactttcaatgtgccagctatgtatgtcgccatccaggccgtgctctccctgtatgccagtggacgtacaactggtaataactcactcacatggttgagagttttaaaaaatattcactttattcatgaactgttgctcttgatgcaggtatcgtgttggactctggtgatggtgtcagccacaccgtgccaatctatgaaggatatgcccttcctcatgccatcctgcgtctggaccttgctgggcgtgacctcactgacagcttgatgaagattcttactgagagaggttactccttcactaccactgctgaacgggaaattgtaagggacatcaaggagaagcttgcatatgtggcccttgactatgagcaggagctggaggctgcaaagagcagctcatctgtggagaagagctatgagctgcctgatggacaggtgatcaccattggggcagagaggttccgatgccctgaggtcctcttccagccctctttcatcggtatggaagctcctggaatccatgagaccacttacaattccatcatgaagtgtgatgtggatatcaggaaggacttgtatggtaacattgttctcagtggtggatcaaccatgttccctggtattgctgaccgtatgagcaaggagatcactgccctcgcaccaagcagcatgaagatcaaggtggtggcaccgcctgagaggaaatacagtgtctggataggagggtccatccttgcctcccttagcaccttccaacaggtaaaccttacgcctacactttatgaggtagcaagaatgcaggtatttctgctttctgttaacatcattcttttggcatctatgctacagatgtggatctcaaagggagagtatgatgagtcgggtccagcaattgttcaccggaagtgcttctaagctctggctttttaatcgcttatctacaaggcagtttcttttcagttttcacaagcccttgtcatgtaagctactctgtttgggattgttggtgtcctatcagaatgttgttggatttgtttcatggctgaatattatgcaccttctgaactcttggtatgcatttgtccggtggctgctgtattatacatggcatgcatggtccaacttttgtcatgctaagtttgtggttagtggtaggaccaaaagaaaaatgggagatgtacccactacctaggatcgtctattgtaatcgtacttgtgcgagtcatgttatcatttatcttgtacattcatctccaagataagtgatctggttctttgatcgtttgattgatggtttttggtta

SEQ ID NO: 4 - DNA, 3803 bp, Oryza sativa
  source 1..3803: mol_type = genomic DNA
agtgagcgggggaaatcgtgcggtgtcgaggatatattcccccctctcctcggcgtcgactcctcctgacttcgcccgccgactccgccgccgccgccgatccccatccatcccgcgagcagagcaggaggagcgcgagcgcgagcgccgccgttcatccgcccttctgcttccgccgcgtcgcatcccggtgagcatcccatcctcttcctcattctctctctctacccacgcatcttctccaattttgcgttagccccttgtttctcttctagacatggaaagtttttctcttaattttgcttaatctaactaatagcagtttttttgttcgccaaaaaagtttttgggttgaactgaaacccccatgtcccattagatccgcccctgcgatatcgtctttgtgcggatctgccatttcgtcagtgttcttagcttttttggttgatctactgaacctcagatcggggatgagacactggttgtgaacactaccaatacgaatttgcggttttttaagctattttcagttaaacttctcttcttcagctttgcttatgttggttggatcgggggatcggccatgcaatatgtggaaggaaactggggaggtcccttcgttccaacttgcaagggtatccgtttggatcattgcgtccatagaaacagaattggatttggatcatctgtttggaggaaaagatctaactaggatttagtacagatttaaaacaaatcgcagccgaatcaatccattggaacattcatgatcatgaatgttagttcaagtgtgtcttcttcttctgtacatgttatgaaaatgaaaaaaaaaacgtaaatgggacttttccgttctgcatagagtctgtagtagtaaatgtttatttttatggtgtgctggtttgcatcgggcaggatggtttgtgttttactgcagagcttttcttttttcgttactgcaagaatctatgtgctatttgttagtcacaatatcttgtcagttatagcacaacctatatattgcatattacttcctaactactaagtttgtacatacaaaatgtcatgttcaggatttcgtgttgccactaggaactagaacgtgaatgccactacttgctggcacttcaactttaaacctccacatttgtatgtttgctggacagatcttgatatctaactactaggctggatgttcagaaactgcaataattgtgatctagtactgttgtggttttattcaactttggtaggcacactggcacagttgcacatgggtaagcatgtccctgcctgacaggacagcttattttctctttagtttcttgagtataaagggaccattaataccatttaagtgttatatgctttcatcttcaaacctgttattagtcattttgtaatgaaaatacatactatgactaaagctagactagaggagtagagctgagttgtgctaaatgcctaaatacaacagtgactttcatatatttgcttatgataaaactgtcttagtttttattggatagctgaatttatgtaaaacattgtaagctgttctttgtttttgtgctcatcaatcatagttctggcctgcaactagtctagcaagaaatatggtaaaaatttattctgtaacaagtaaatgatggagatggcttatgatttccttgttcagattaatggccgacggtgaggatatccagccacttgtatgtgacaatggcactggaatggtcaaggtttgattcttataccattgtccattcgttttttttaattcatggaatgagttgttcaaaaataataataactctcactctctctctaggctggttttgctggtgatgatgcccccagagcagtgttccctagtatagttggtcgccctcggcacactggtgtcatggttggaatgggccaaaaagatgcctatgtgggtgatgaggcacaatcaaaaagaggtatcttgaccttgaaataccctattgagcatggtattgtgaacaactgggacgacatggagaaaatctggcatcacaccttctacaatgagctgcgtgttgctcctgaggaacatccaattttgctgacagaagctcctctgaacccaaaggctaacagagagaaaatgacccaaatcatgtttgagacattcaatgcaccagcaatgtatgtggctattcaagctgttctttcactatatgccagtggtcgtacaacaggcatgtgtccattttctactattcaaaatgagtctttgtacacttacatctcttcattggtgatatgaccccagtgcgttgtggcttgtgcaggtattgtgcttgattctggtgatggtgtgactcacacagtgccaatctatgaaggatatgcacttcctcatgctattcttcggttggatcttgctggtcgtgatctgactgactgcctaatgaagatccttacagaaagaggttattcctttacaacaactgcagagcgggaaattgtgagagacataaaagagaagcttgcatatattgctcttgattatgagcaggagctggagactgccaagagcagctcctctgttgagaagagctatgagttgccagatggacaagtcatcacaattggcgcagagaggttcaggtgcccagaagtgctgttccagccctcgctgattgggatggaagctccggggatccatgagaccacctacaactctatcatgaagtgtgatgtagatatcaggaaggatctctatggtaacattgtgcttagtggaggaactaccatgttccctggcattgctgacaggatgagcaaggagattactgcccttgcaccaagcagcatgaagatcaaggtcgtggcacctcctgagagaaaatacagtgtctggattggaggttctatccttgcctccctcagcacattccaacaggtacttgcatgcattctctttaattctgggggttcatggcatgttggtacttatctgcagcattcatttaattctggggagtcctggcatttgggcacctagcggtcatcctgaggaaatttattttatgttctcctttaacatcttccaactttgaagttttaagtgaacaactatgtagcaaatttcttttgtgattcctggtaaataggaaggcatcttatagtttggttatacacgatgtgatcaacatttatttatattccaaaactatgattagaagaaatgaaagaaaaagaaaaggtagtcatttgctatttgattatgccctaataaactagattacacattaattttgaatgcaaaatgttagataaagacacttatcctgttctttttcctgtcgcagatgtggatatctaagggagagtatgatgaatccggcccttcaatcgtccacaggaaatgcttctaatccgagccttgctctgagtattttcggtgtgcctctctgttgtctgtactgtcagtcttgtgagctttgcatggttgggcgtgtgtcggtactttcgtcgtcagtatattttcaagtttctgagagcgtttttttgcatatatgctagtactactggatgaagaaaaggtagatccaagctcgtttgtttgagatatatcctgctttagtgatttcagatgccgtgtgttctagtgatatgttgatattagtgagtgagaattgtatcggtttggccgcctcggccgttctgtgactgcggaacattagctatgtatgtatatttgcctaagtattggctatattactatggttgtgtacttgtgttcgatgtaatggtttctaattatacttttg

SEQ ID NO: 5 - DNA, 3591 bp, Oryza sativa
  source 1..3591: mol_type = genomic DNA
aatcggattcggattcgtcgacaagttaagagacctcatatgaacttatttcttccttgtttggttcgacctcgatcggggttgagtgggctgtggcggtgaaatcgagcccaaatcgacagttgcagcatggtccaaagcgagcccaaaatcaacaagaaggccggcccaaaggctgaggcccatggacagctgcagccatcaaagccgccccaccaacacaactccccacgaggccccgagcatatcatcgccttcgccgcaaagtcccaacactagcggcgaccggcgaggactccggcggcgacgtgggtgggactgagaagcgccgccgctgacaccagcgagacgaggcggcgacctccgttgacggtaacctacctaccaacctcgccattcctctccaaactgttgtgctgctgtctagatctcccacactacactagttactcctcgtagatctcggctacctggctcaagatccggggtcagatccgggtccggggattttctttgtgccctatggctgtattttggcgtctgtggctgatgacagcgtgtgttctcgagtgcggatgcaatctgagttatataggcaaatggccttgtcaactcgggcagcggcattgctttgctcagtgtgtttgaatgtgctgaaattcatgtagtaggctgtaggctgtgcatttcttgatttgcgtcttgcataattcactggtggattttctaaacctaacaagtttaaaattagaccattcaaccaaagacaggaggaataagtgaagctgttgtagtcacagcttatggccgatccaaaatttgttaggaatgtgaatatgtgatgctacaaacatatccttgtaagctaccatgctatttatcatgttccatcatggtgattggtgagcactcatgaaaaattcagatccaaacctagtgttacatgtggatttgtgctctgcaatctatcgccagtaataaaatggttgagtgatccagctactacaaaatcacattgcatactttttttttttgtagattatgcatcctggttttgggtggtgggttcctgatgtcaggaatataaatttagcctgctgatttaggtagcactgccggtgcacactttggtttttgaatacttgtagtcttccagcttcttgtagaactggtacaatgtgggccgtatataagaagggctgtcaactagcacatgctcactaattagtctaaacatttatgtttttattcattcaggtcaggtgcaatcatagaagtagttaatgacaatactttagttgttctaatattatttatgtatggactcaaattaacatgcaaaacatatgagattagtggcatgcattctttttcttaatagtggaaaatacgagataatgataactgtgaagctctgttagtactcttcattactctatttgagtggcagcatatctcatgctagccataaagcaagttctagacgtattctgttgttaattacttgtagctatataacccaacctagtcattccagcttatgtctcttagagatcatgtttattagcacctcaagatttcctctgcacagtatagtaactatcgaaaaagatattatttctttgtttttaattgacaaccttcacgtgctacttatttttgcagagtaaatctataggaaatggctgacggtgaggatatccagcctcttgtctgtgacaatggcactggaatggtcaaggtcaggaacttcatcttttaaaccatctatcatctccaagactccaactgcatttttaccaatttgaattccttaaaattttgcaggctgggtttgctggagatgatgcaccaagggctgtttttcctagcattgttggtcgtcctcgccacactggtgtcatggtagggatggggcagaaggatgcatatgttggtgacgaagcacagtccaagagaggtattctcacgttgaagtacccaattgagcatggtattgtaagcaactgggatgacatggagaagatctggcatcacactttctataatgagcttcgtgttgcacctgaggagcaccctgtgttgctcactgaagctcccttgaaccccaaagccaacagggagaaaatgacacagattatgtttgagacgttcaatgttcctgccatgtatgttgcaatccaagcagtgctttcactctatgctagtggccgaacaacaggtatgtgatgttttacttaacttctttctttccaatttcttggttcttttgcatctatagattcatttagatgagagctcggatgattaagaactattcttatacatttttaatgttggtcagtaggtgttagaattatattatctatgctcaataatagtcgtgcaattatttaatgttggtcagtgcatatggctaatgctgttttaatcaacaggtattgttctggactcgggtgatggtgtgagccatactgttcccatctatgaaggatatgcacttcctcatgcaatccttcgtctggatcttgctggccgtgacctcacggattctcttatgaagatcctcactgaaaggggttactcgttcacaacctctgccgagcgggaaattgtgagggacatcaaggaaaagcttgcatatgttgcacttgattatgagcaagagctggaaactgccaagaacagctcttcaattgagaagagctatgagctgcctgatggccaggtgattaccattggctcagagaggtttaggtgccctgaggtcctcttccaaccatccatgattggtatggagtccgctggaatccatgaaacaacctacaattccatcatgaagtgcgacgtagatatcaggaaggacctgtatggcaacgtagtgctgagtggaggcacaacaatgttccctggcatcgccgaccgtatgagcaaggagatcactgcccttgctccaagcagcatgaagatcaaggttgtcgctccacctgaacgcaagtacagtgtctggataggagggtctatcctggcttctctcagcaccttccagcaggtaagtccttatcattacagcttcttagatgctcaccagaattagttcataactacttcataaccaatccattttgtttatttgtccacaccaagttgtattttaatggttttgctaatgcacatgtgatttgtttgcttggcattgataaaaacagatgtggatatcgaaggatgagtatgatgaatctggcccagcaattgttcacaggaagtgcttctgagtttctcatgctgccctgtgcgtcggtttgtactagaggagaaatagttgcctttatgcagccataaactgcctgtgaattgtacgtcactctcttatgtggttggttgctccagatatcgttgtactatgttcttagctctgtgactgtgaggtcacctctggaacttctctggcttggttggttggatggagttgtgatagctgatagccctggtgttgtttggggtacaaactcatgtggaattttgaactatatatatccgtgtctggtcatctggtgacatgtttgatgcgtttctagtatacctaccaaa

SEQ ID NO: 6 - DNA, 3867 bp, Oryza sativa
  source 1..3867: mol_type = genomic DNA
caagctctcaactttccagtgaggccggcgcctctttacatctcattcccccaatttcccaccaccatcgccattgccaccacctctcctatatctcgccctccccctcctccctcccacgccattcgcctccttcttgctgccgccgccatccccggttcggttctctcctcttctttaggtgagcaactgcctctccatgtccaggccctcccggaccctgcttgctttctgttttaatgcttgatgtttcttgcaatcggagatgtgttctagttctgttagatgggtgaactactgaactgagttgctgaagtaggtgtggctggttgcttttgcttgtgtgttgtcaaatgttggatccgttggactgtaggagttcagggatgcgcgtatactggttgtttgttgttcttggtgaatgctgatccgatccattgctttagttgatggatgtatccgatcttgtttgtgctgaggtgacgagtagtcttgcagtagatctcttcgtgtttatgttgtgttgtgctaaggtcttgtagttcccaaaattttttcccaaaaatgtcacatggaatctttagacacatgaatggagcattaaatatagattaaaaaaactaattgcacagtttgcatggaaatcgtgagaccaatcttttgagcctaattagttcatgattagccataagtgctacagtaacccacatgtgctaatgatggattaattaggcttaataaattcgtctctcagtttctaggcgagctatgaaattacttttttttattcgtgtccgaaaaccccttccgacatccggttaaacgtcggatgtgacaccaaaaaattttcttttcgcgaactaaacaaggcctaaggcgtgaagttgggggtatagtttctctgaattgtagatcaactgacagactttcgcatgctcatagccggtttgtttgcggtactcaagaaactgtcttgattggtcattccgtaggtggggacttgtgaaaaagctgattcctttcttttcatttccacggttgctttcttgttggcgtgggaaaaaaacagttttcagtactgtaccgatcgactttcttttgagacttttttctcctcaacaaaacatttcatagttcacacaaaaacacaagcataccaacgatttcattatgtgacatggcttctaaaatctgaattaaagaagcaagttgcttaactgaaaactgcctagtttcagaaatcatggagtttaaattttgtactaaaaaatgtatgcttatggaccactattctaagatgcttcacatcttgatgacggctgtctgatcagaaaaaaaataatgcttcagatcaaccaatcagacaatccaggatatgagcagatcatgttgcattcatttcatccactgaagcatgtcccttttttctccctgaagattggtctaaatcgattcaaatacacattgcattgtatgctcttaggagagagcaccattcctttggagggttggtgattcagaccagcctcggttgattgatttgaatttcttaactacaagtcacttgatctagttataatttacgcatcatggaccattcattttgggagtttcctatatacaactaaagtgttatacttcttcctatctgcgccttcctttttgtttgaataatcctccctctttcacaatttgcaatactagttagtcaattaatagctttgaatgtgatatcttaaagacatgtattttgtcattcatgtttgatgaagactcgtgtttttgtaggatgaatgtttagttcaagttacatttttctgtattaatctatagtctttgtaaacactgttttgaatgatttattttgtgttatgcagatcagttaaaataaatggctgacgcagaggacattcagccccttgtctgtgacaatggaaccggaatggtcaaggtaataaaaagtgatgacttggcatcgcattgttgaacaaaatttctacctgatggtaattattgttacaattgagaagctcatcaagtattaactgttttcatttttcataggctgggtttgctggagatgatgctccccgtgctgttttcccgagtattgttggccgtccgcgacatacaggcgttatggttgggatgggacaaaaagatgcttatgtcggtgatgaggcccaatccaagaggggtatcctaaccttgaaataccccattgagcatggaattgtaagcaactgggatgacatggagaaaatttggcaccacacattctacaatgagcttcgtgtagcaccagaagagcatccaattcttcttacggaggctccacttaaccctaaggccaacagggagaagatgacacaaattatgtttgagacattcagcgttccagccatgtatgtcgctattcaagccgtgctttccctctatgctagtggacgtactactggtaagtgaacaaagaataagcattttcatttgtaaattctgttttgctactctggaatctcaatagagcaggaacaaaccgggtgatgttcaaatcaaatgctatgctcacaaccaaaattagcaatatattgtctaaagtaaacttaaattgaaccattcaaaccaaataaaatttaagttactgccttgttttacagatgttacaatacacaaaaactgtcattatgttctctcgtaatttgtttcttgatattttttgtcaataggtattgtcttggattctggagatggtgtcagtcacacagtcccaatctacgaaggttatgcccttccgcatgccattctccgtcttgatcttgctggtagggatctgactgattccctcatgaagatcctgactgagaggggttactcattcaccacctctgccgagcgggaaattgtccgtgacatcaaggaaaagcttgcatacgtcgctcttgactacgagcaggagcttgagactgcaaagagcagctcatcagttgagaagagctatgagctgcccgatggacaggtgatcaccattggcgcggagcgcttcagatgcccagaggtcatgttccagccttctctcatcggcatggaagctccaggcatccacgagacgacatacaactccatcatgaagtgcgatgttgatatcagaaaggacctgtatggtaacattgttctcagtggtggatccaccatgttccctggcatcgcggaccgcatgagcaaggagatcaccgcgctcgcgccaagcagcatgaagatcaaggttgtcgctccgccagagaggaagtacagtgtctggattggaggatcaatccttgcatctctgagcaccttccagcaggtaatgcaaaatcatccaacagttaattcttgatacactttctagattgttcgagaaggttcttgacatatgtttctttccttttttttgtgcagatgtggatctcaagggctgagtatgaagaatctggcccagctatcgtccacaggaagtgcttctagatgtggcctagctgtatctttcatgagaaccccttgtctattagcattagctggctgtttcatggacaaaaaaattgttgggtctgatggcttgtctatgggtgtatctactctgattagctccggtttttgtgtatgccaatataattattccgtaagtacgtggggagtcaagaacattatgtgtgtagtttgatttcataaattgatttgagattcttgaacttttctagtaccgcaactgctagtctgcaaccttgcaatgttcatcctctttgtcatgagcttgtactacttgaagatactatgcccctgtttggggaggtcgagattttaagaagtagctagctagtgaaaatatgaaaa

SEQ ID NO: 7 - DNA, 3181 bp, Oryza sativa
  source 1..3181: mol_type = genomic DNA
tttcaaaacagaatcaagaaagttgaaaagaaaatatgtgcatataaaaaggagacaaatccaagcagagccctaagctctcctgcctagttcttctgcacctcctccatctccatctcggtggaggtttcaggcaggcaatctcccggtaagaacaaccaaaaatattcttgaatctgtttgtgcctttctttctcagattctttgtgctatattttggccatgtaaatgtaatatttgactgcagttcgaatccagttcataaggccaaattataatcttcttgcactgccatctttccaaggctaatcaattaagctgaagcttacatgctgtggtgtgttcatacagtttgttaggacttgattacataaaaaaactagaatatgttaggacttgatttataccctagatgtataggatcaagtttaacatttgtgatgacaaaaacatccattttaattcttcagtgatcatgactgcattgccttgttactactaaataaatagattgtccatattgttcttaatcaatcgatatagtcttactgcattggaactaatagatcatggtccattttgtcctgaatcaacagatatataatctctgaagaatcaaatggctgacggcgaggacatccagccccttgtctgcgacaatggcaccggcatggtcaaggtcatcatcatcatcaactcaatccaattaaccacctctcacaaatcacaacaacaacaacaaaccataccttatgttcttgcgttcaaaaaattcagtaaacaacaacaacagcaacgataaaccattgataataataatccaaaattcaggccgggttcgcgggcgacgacgcgccgcgggcggtgttcccgagcatcgtgggtcgcccccggcacacgggggtgatggtggggatggggcagaaggacgcatacgtcggggacgaggcgcagtcgaagcgggggatcctgacgctcaagtacccgatcgagcacgggatcgtgagcaactgggacgacatggagaagatctggcaccacaccttctacaacgagctccgggtggcgcccgaggagcacccggcgctgctcaccgaggcgccgctcaaccccaaggccaaccgggagaagatgacccagatcatgttcgagagcttcaatgtccccgccatgtatgtcgccatccaggccgtgctctccctctacgccagtggccgcaccacaggtaacgcaaatttaaaatttcattttcgaaatttgatttatttctttttttttttttgaggggggttgtccttaaatactatcttcgtctaaaaatataagaatctaggatggattggatattgatattttctagtatagggagtatgaaatattccatccggttctatattattatattttagaacggagggagtagatgacgtcctaaaatacgtacagtcaaacctcaaaattttaaattattaatgtatgaaaaatattactaaatttattattaaaagcactttcgtttagttatattctttcttagtagctattacaaatatttagttacaaagagtaaaagatagtagtaagtggtaaccatcctgttgccgttcataaatttcaaaattttgtccttcatattagtgagatttgaaaaagaaaataaaattgttcatcttgttttaattaggcatcgtgctggactccggcgacggtgtgagccacaccgtgccgatctacgaaggctacgccctcccgcacgccatcctccgcctcgacctcgccggccgcgacctcaccgacgccctgatgaagatcctcaccgagcgaggctactccttcaccaccaccgccgagcgggagatcgtcagggacatcaaggagaagctcgcctacgtcgccctcgactacgaacaggagctcaacgccgccgccgccgccaagaacagcagctcggtcgagaagagctacgaactgcccgatggccaggtgatcaccatcggggccgagaggttcaggtgccccgaggtgctgttccaaccgtcgctcgtcggcatggaggcggccgggatccacgagacgacctacaactcgatcatgaagtgcgatgtggatatcaggaaggatctgtacggcaatgtcgtgctgagtggtggatcgaccatgttccccgggatcgcggaccggatgagcaaggagatcaccgcgctggcgccgagcagcatgaagatcaaggtggtggcgcctccggagaggaagtacagtgtctggattggtggatccatccttgcctcccttagcaccttccaacaggtaaaattttgattactactccctccgtttcatactatgagtcgctttgactttttttctaatcaaatttatttaagtttgactaagtttatagaaaaatttagtaacatctactaggtcaaattagtttaattaaatataacattggatatattttcacaatatgtttgttttgtgttgaaaatattgttatatttttctataaactggtcaaactttaaaaagtttgactaggaaaaatatcaaatcgacttataatatgaatttttctctctttttgaaacttgccaattcattcaggaagaagagaaatgaaaggctacatgttttggttgcacaaatatgatttttttttcatgttcttggtactattttttttaaaaaaatgaattaaaatgtttccgtgttcttggtactaattaacagcgcactatgatgtttattgtgcaacagatgtggatctccaaggctgaatatgacgaatcaggcccagcgattgtccaccggaagtgcttctaagttcttggtcttatttattctcaagttcttgccgggtttccaatgagatatattgttgagtttgtctgtttgagcagtgctgaatcatacatggccatattagagttcctgttgatgccaggtttgttgctagtattgaggaatttgaactatccaccactatcttttgtaatagtaattgcgtcacctgagccacattatcattcttctgtatattcataattcatctgcgtgagttgtaatttactgcatatatatagaacatttgtttcatgatttcggatgtttttaagttcattactgagcctcccaaattgatgtttctatagtactgattgctgtttttgccggaaaa

SEQ ID NO: 8 - DNA, 3505 bp, Oryza sativa
  source 1..3505: mol_type = genomic DNA
gccttgagatggacgcgtataagccggcgcctcgcgttttcttcgtccgtccaccgacccagcagtgcacctcccgttcgcctcgctcgcgagctcgcgttactttacaccgccgccgccgagctctccagactccggaggaggaagcgatcgttacacgtacgcctcgtcaagcagaagcaggtgatcctccgccccttccgatcccctcggtcctccgagctgttcgatctgagaagaaaaaaaagaaaaatctgctggattatactttgcttgctctaggattaattcatcgccttattatggttgatgattttatttccttcgtaattactgcgtatgtttttctctcggctgtacccgatggaattttggtagttggtttggtggtgtcctggtgatcccctttggaacaatcgaacataattcttcaggtttatcgtgttgtatttagtaactgttcgtgccagtaagtactgtgtagtgattgtgattagtgatatttgctcatgcatacaggttaggtgaactgggtttgccgtcgtggggcatcatgatctccccgttgtttagagaaatcagctgtagcttttgcttttgtagagcttaccccttttttttttgaacgaaacgagcttaccccttatcagttatcaccgtggctgtgaagctacaatttctttccctgcccttttattattagtgttatgataaattgattgatgttgagatagttcttgtgatgtgtcctgatttgaactctgcgtgtaagctgtgacatgtgtcccctatttttttccgcacctcatcaaactggataggttcaggataaactatgtattattaaaaacgccaccaaaacaagttgatgctttggtttgctgctcggatgtaatgtgaacttcccaaaatcttaatacaaagatgcgcaactcttttgcgcattctcgaaagaaaaaaaaaacgccattgaaacaagttgatgcttggtatagttaatgtgcttatactctgttgtgcaatgtagtgaatatactagttagctgaaaattgcatgatatactttcaaccttgatgcttcaattaaatatattccaatctgctgggcaccgatgatttttttttaaaagattgtactctggacatctcaagcagtatatattaatacatgtagtgtttatgttattagtttacttggttttgcccagcgacttctagccttctgggtacttttgtcagagcctaacaagtgatgtgtaattatcacgcatttctgttgcagaacatctgaagaatggctgacgaggatattcaacctattgtgtgcgacaatggcactggaatggtcaaggtggttatcctgaacttagtcttttcagcaaagcggtatgttcctcatagcttaacggatcaccttcctaatgtttaacaggcaggttttgctggtgatgatgcaccaagggccgtcttccctagcattgtagggagaccacgtcacaccggtgtcatggttgggatgggccaaaaggatgcctatgtgggtgatgaagctcaggcaaaaaggggtatcctgactctaaagtacccaattgaacatggaattgtcaataactgggatgacatggagaaaatatggcaccacaccttctacaatgagcttcgtgttgcacctgaagatcaccctgtattactaactgaagcccctctcaatcccaaagccaacagagagaagatgacacagatcatgtttgagaccttcaattgcccagcaatgtatgtcgcaatccaggctgttctatccttgtatgctagcggtcgaacaactggtatgattattacctttgcaatagatcgtgttaaaattcaatgtgttggggggcagtgacacttcttttatctgcaggtatcgtgcttgactctggtgatggtgtgagccacactgttccaatatatgaaggatatacgcttcctcatgctatcctccggttggatcttgctggccgagacctcactgaccatctcatgaagattctcacagagagagggtattccctcacaacaagcgctgagcgggaaattgtcagagacataaaggagaagctcgcttatgtcgcccttgattatgagcaggagctggaaacttctaggagcagctcctctgttgagaaaagctatgagatgcctgatggccaagtaattaccattgggtcagaaaggttcaggtgccctgaggttctgttccagccatctcttgttggtatggaatctcctggcatacatgaagctacatacaactccatcatgaagtgtgatgtagatataaggaaggacctgtatggcaatgttgtcctaagtggagggtctaccatgtttcctggaattgctgatcgtatgagcaaggagatcacttcccttgctcctagcagtatgaaggttaaagtgattgcaccaccagaaagaaaatacagcgtctggattggtggttctattttggcttctcttagcactttccagcaggtagggttttttttactcaactctggaagttgcacatgatgctggtgatgttttgtctcaattaaaaatgttctatttatttttagattagaagatttcacttttttattagtagtttatccatataatctcgattcaatttatactagtaggtttttcactgcccattttagatagtcctatttgaattcttaaaaagaagttgagtacacatctgtgcttgcgagcgttttaggaaattgtctagttagcgtccaatactgcacaaatggccaaatctccatgtcctatgtttatcacataaaagaggttaattctccaatagatgccgcaaattgccgccagtgttatgatttgcttttgcaatagagacaaacatgatcacattacaggaagtatttgtgcttgaagtattagtatgtgctgagattgcttttgcaagagacatagaaccggaagtgtaatagctgctgtcataactgtatttattgcacatatcctcagaatcacatctgacaacgataacatttgtttcacagatgtggatctccaagggcgagtatgatgaatctggtcctggcattgtccatatgaagtgcttctgagcttcttgccaagtttgtagagcggtatttcaagatgtcgagaaatctcagttggtttatgtatacaaggagacctgcttttgcagataaatatatacttgtactctgatagttgagatatgcttttagcgttgggcatggcaaaccaggattcctcagaacgttgagactatcttaccatgaagagaaagaggggcccaggaaaagaaacaaaaaaaacacctgatgacctgaagatacataaacttgagcagtctatgtcgtaaaacctgtttgttcttttggtgtggaattacctcggttgtttacctgctgtatgaaataatgaagcaaaccatatatattcgcatgcgctagtacatcaatgtagttctgtttacgtc

SEQ ID NO: 9 - DNA, 3417 bp, Oryza sativa
  source 1..3417: mol_type = genomic DNA
ggctccccttgctgcgctttccgtttcggctctcccatttgtctcgcgctcgctgtctcgcgtcagcggcggagctctctagaaggagcagaggagtcccccccaagcgatcgattcgatcccctccgccgccgatcgcctcgccgaagtctccgaggtgtaagcccgttcgatctctccctctccctctccatccttgtttcgatctgatccgtggaatcgcttcgctggatcgccggtagagcttcccgtgctttgttgtccgggtgatttttccggggaatttcgcgctgttttcgtggactgtttgtgttgacctcggcgtttggacgcttgcggttgatagctgtatcctctcatgactagcaagggaattcatggcgtttgtgtactgtatgttgtatagtctgatccttggtcgggttgtatgctgcagttgcagacagcagagcagttccaatatcacttctggagatgatctcaaactgcataatacctattctaatactttctatttcctttctaacaatccgctgcgcagctagttgtatgttacttcagtcgatacttgcatcatgcatccagaattccagacaaatagttgtatgttacttcatgttgtgttttttcctttgttaacatgaaacctctgatgtgtcacatcgtgattgtgtttacctttattgcgtagttttttttaaaagatccatactgccttactgaaatcaaagcgaactcaaatgaaaattctttcttattttgcatgatcatacattcagtcccaggtgccacttctaatggttagtcccatgttgtgttttttcctatacctgatcagttccctaatgatatgatctgtattttattggttgttcgttggcatgttgtaaatgtttagtgattgctacttcattttttttatcatgcactttatttgggcccaggagtaagctcggtggcacttaagcaaaacagtgcttaagttaatatgcacaataattgatttttgaatgcattctgaatactgatatttgttgcagaaacacttgagggatggctgaagaggatatccagcctattgtctgtgacaatggcactggaatggtcaaggttagttaattttcctgccacgctgtaaaactgttagttcgcacaattgggatgttcagattctcttttgcctgctaatacatttgtagcacccaacgaattgatcatttcttcatgtggaataggccggttttgctggtgatgatgcacccagggctgtctttcctagcattgtaggcaggccacgccacactggtgtcatggttggtatgggccagaaggatgcctatgtgggtgatgaagctcagtcgaaaagaggtatactgacattgaaatacccaatcgagcatggtattgtcaacaactgggatgacatggagaagatatggcaccacaccttctacaatgagctccgtgtggctcctgaagagcatcctgtattgctgaccgaggctcctatgaaccccaaggcaaacagagagaagatgacccagatcatgttcgagaccttcaactgcccagcgatgtacgttgccatccaggccgttctttcgttgtacgccagtggtcgaacaactggtatgatgattgctgtacaaaaaaaaccatttgattttaacatacttatctaaaaaaaattgattttaatatccaatgagtagtcgaactgcgctaactagtttataaatgcaggtattgtacttgactctggtgatggtgtaagtcacactgttccaatatacgaaggatttacactcccgcatgctattcttcgactcgatcttgctgggcgtgaccttaccgacaaccttatgaagattctcacagagaggggttactccttcaccacaactgctgagcgggaaattgtcagagacataaaggagaagctcgcctatgttgctcttgattatgaacaggagcttgatactgccaggagtagctcctctattgagaagagctatgagctgcctgacggccaggtcatcaccatcggagcagaaaggttcaggtgcccggaggtgctcttccagccatcttttattggtatggaagctcctggcatccatgaagccacatacaactccatcatgaagtgcgatgttgatattagaaaggatttgtacggtaatgtggtccttagtgggggatctacaatgttccctggtattggtgatcgtatgagcaaggaaataactgcacttgcccctggcagtatgaagatcaaggtagttgcaccgccagagaggaaatacagtgtctggattggtggttccatcctggcttctctcagtacctttcagcaggtatccattgtctcaatgcatatacttttgtttcatctgcttaacgagattaccaaactatgtgtcttaatgcatttttagtccattgtctgcaagacactgcatccttgcaaacatttaacaaactttttggtgttgctttctttgacatgctccttgggccatgtgctgtggactgtgtcaaagggtggagatgtacttgatctttccattatcttaaaacacaaaggccaagacaggactttactaggaagttcaatatatacttagttcatggattagaaataatgatttttaaaaggaaatcttagcgtcaaactgttaagtaccgaccatgtcaaaaaaaaactagtgtaattttgttgcatactacatgatgtataagacataactcctattacataaacctgattgtttgtgaagtttttagacagttctctttgtctagtaatatgcactactatttcttctttgaaattggtatttctattgctgatcattttgctctgcaaaactaatgacatccacttaatttgtcacagatgtggatctccaaggccgaatacgatgaatctggtccaggcatcgtccacatgaagtgcttctaagtttgtgggcagatttgtaccattatcagctgattgagacgtgatctgcagattgtttgcatgcgtcccatggtttcagtagcacctgagggctgttggccatggggcaatgcggaaggtgaagtcaattggtgtactggaagaaatctgtccaggtagtgtgcagtgtaggtcgtctgagtcggtcagttttttcagacaatggcatcgcatcagggcattcctaatgtatgcaatggattgttgtgttgggtttcaccgggcaacaaggatgtttgcccgtgcagtttgaaagctttttgtttcgaattttctactagccgaattgcgggtcttaatgattgtacctctagttttgttttctctcttgaagataacttatttttgtgtacgtagtaaaggtttatttgtatttgaacgacttgtagtgttttggatgttatgctttcccc

SEQ ID NO: 10 - DNA, 5371 bp, Oryza sativa
  source 1..5371: mol_type = genomic DNA
acgcgcttgtctctttcttcttcttcttcttcttcttcttcttcttcttcctcgcgcagcctccaaattctccaaaaccctcgcgttttcccgcggcttcgcttccggggagaggagattttcaaaaataaattcctcatccacatcctcctcttcccctagctcctaggcagggtctcgtctcgactccgaatcttagggtttctcctccccgctccccgccgcgggcgccatggaggcggtggtcgtcgacgcggggtcgaagctgctcaaggccggcatcgccttgcccgaccagtccccatcgctggtgagcggccagatctcccgctcctcttgagattccgttggttatttgagaattatctgaggttttttgggtttggtttggttttggttggttggttaggtgatgccgtcgaagatgaagttggaggtagaggacggtcagatgggcgacggcgcggtggtggaggaggtggtgcagccggtggtgcgtggcttcgtcaaggactgggacgccatggaggacctgctcaactacgtcctgtacagcaacattgggtgggagattggggatgagggccagatcctcttcacagagccgctcttcacacccaaggtgataggcttcgtggttcatttgaacgtgttcattgttctacgctgtaaacctgttgatttggctgataactggtccaaattgatactcactcattactttacatgccgaaatgttaagctccgaatttttagggtcatttggtatgtctatgaggtgcccatagcgagtttaaacactttgcgtctaacttgctagctatagtctctaggctaactgccattatatggtcggattttgtcctaaatttatgtttcagtcaaactcttgtgctattttttggttatttgttgaatagctcaattgtaaagaaaattctagttttggaccaaatcggtatatgctctgcgttataaagtttaaatctaactcgattttaacgtgctatgtgcattataaaatatttaaaatttaaacatgtaatatttaaacatgtcctattgaccattgttcatgcttctgctcaagcaatgtttgttagctaagctgcagttgttcctgcatatcatttcaaaattacgatttactgatagatatgctacctgaatatcttgcattccttctagtgaatattttccagacattgatattgcacgaacgggaatgggtcctttgctccttttactagcatatttagacatttcatgattgtgtgtgattgcagtgctgtatcttgtgttgctctatgtaatcttgatggttgcatgaatccatagaccaaataaatgtcagtagtttcgaaaagccaagctgtgctaaagggaccctaagtatgcttcgccgttttgaacttcaattcaaattctttgttactactttacgaagattgtttcatttgacttcgctcattatttttattgtgaatgcgttgatttaactattattctgttgtttcaaattttgacagcatgtttcctcatcttttgttatgctctctccaggcacttcgggagcaactggcgcaacttatgttcgaaaaattcaatgtttcaggcttttatgactctgagcaggctgtattgtcactttatgcagttggacgcatttcgggctgtacagtggacattgggcatgggaaaatcggtaatataaccctacttttgtttgagccaatatagtagtatgtttttccttttaaattttgtgcttatttttatttggctaaagatcatgctttgctctgcattttacttccttatgcatgaactcttgccatataagcaaaactaaatttctctgtgacccaaccttttgttttaggaaaaatgaattgaaaaaacaacatatgttgtttgttgttctgtttgtatgcttctctctctatatattgtgtatttgtgtgtgttgagaggatggaggggggggggcataattccatactgacagaaataaaaggtacaacagaatcaaattcacctaatgaatgcttctaagtacagagaagacaactttacaagtgtagcatatcttatgttccttgtgtaatgcttgcatcccttttgcttctttctacattactccctccattccactatacaaggctttggatgcaaaaaccaaggaagctcctataactgccacagaattagggggctttaaaacaaccaaagcaagccaacgaatagcgttcactgcatgcatgtgcatggatgagaattacatgattcaaagaggtgccgctgcagctgccttcaatgcatgcatgcgcatgaacgagaataacggagtcaaggaggtgccgctgcatctgccgccctatattctggaacttctgaaaaacacagttaagccttgtataatggaatggagggagtatttatctactttagagtaaagctgcacatatcgaaggcttgctgggaaaaaagaatgatttccttttgagctcaaaaaatgtgcaacaacaagtgccgcccagtgattaatgatgtttgtgcatacacagaacatcatacaagggtgacagaaatcttgtgtaattgaaatgcttaggttactcttcttccattattattgttctactcattaaggtagtatacttaccatgattttgtttcagatttttttaaaatattcatttttatcttgctattttctggcagactattttatcttactattatttttctggcacactaacttaatgggaataactgtggagtaactccaacctcttttgttgcaggcatagataaacatttattttatttgttaaaagattccatttaattaactagattctgtaacacatcagagcaggacacagcaatacaaagctggccccaacggatgtatataaataattcaattccatctgtaaactgtatttatgttgttcagcattggctgtgtggtgtgttttgataaacaccgtttagtttcataatggtggggaagcagcagtcgttttggagcttaacgttgtattgacatcctttctattttaacagatattgctccagtttgtgaaggtgctgttcagcacatagcatcaaagagatttgatattggaggaactgacttgacaaacctatttgcggaagaactcaaaaaatctaactcatcggtaaacattgatatttctgatgttgagcggctgaaagagcagtatgcatgctgtgcagaagatcaaatggcctttgaagctataggaagctcatgccgaccagaaaggcacacacttccagatgggcaggttggttattgacttgctctatattggtcttttctatgtataatatagggcccagtattgactttgtttctgttaactgtatgtgttatgtgcaatctgtctcttcatgaaatgcatgatagctgtatgtcttaatctgttttggttgatcacatatcttgttggctacttattgctatgaatctgtgcaaacctatatttctgaacacttcttcccccaggttataacaattgaaaaagaacggtacattgttggtgaagctttatttcaaccccacattttgggcttagaagattatggaattgttcatcagctggttacaagcgtctcgaatgtcacaccagagtaccatcgtcagctgcttgaaaacactatgttatgtggtggcactgcatcaatgactggttagttaatgctactttacgctgtcggattcatcagtcttttacctcacaaataaaaggcatatacatcaactattatttgagcatttttagtcttgctattttgacattgataatatatatacatgtgaagagcattatcattcggtatgaaaatttgcattctgtatgagacttgtggagatgcaattatctgagccagtattgtaatgctattggtttatgatccatgtgagaattactattgtttgtttccttgctatgttccagagcaaagaaatgggaccactatggtagtttgtccatttgagaactcttgctgttggaccttgaacttttatttggagggagagaaactgggatcttttattatattaggaaacctcttgttctgttgttgtcattttgaattttgtcagctgtcaatattacactgaatatgtggtggaaaatttgtgtttggttagagtcaagagtcttacgatactgcagtctggtcacagcagtgcatataatcaatattttagtgaatacttgcttaaaatatgttttggtctgtatacgatttggtttggtggcactactgtagctttgcattcattagtgctttcttatgcttggttgcagattgatttaaatggcttttcatttcatgtcaccaaaaccatttgaaaccaattatttagttaagagccttataacttagtttcaatttcaaggtatataacctcatgctttcactttcaaggttttgaagacaggttccagagagaagcaaatctgtctgcttcagcaatctgcccatctcttgtaaaggtaaccacctccctctcccttcatcccaattccccaggtccaactctgtttgaccttcattaaccaaacactcgttcctccagcctccagaatatatgcccgagaacctagctaggtactcggcctggctgggcggtgcaatattggccaaggtcgttttcccgcaaaaccagcacgtcaccaagggagactacgacgagactggtccatccatcgttcacaagaagtgcttctgaataacagctcgccttggaggcatgaacaccttgcacgggtaggtgcgccctttactgttgctgtcaagtcttagtgctttcaccaccccgtgattggtacggttgtacgtgcgtgaccctaactcaaagccggatttgcctttcagggcgtggatgcacgaatctacagtttactggcatgtaggggcctgcctgccctgtgcttcaactcgctgtactaacttcctctgaagctgcggttctgagcaattcattagattcggttgtgcccgcggctgccaggtccagtttagatggtgtttgttacacttgttactagccattcaggatgcagtagaatctaacattggcatctatttattacaagttgtagaggattgtacctggcaacgctcgtaggctgcattcgtttgattgtccgttcaccgagcgtacggaaatcagttcattctgtgattctcccttccaattgctctctgaattctgtgtagctgtagtgctgtgtagcaaactacaagaaaacaaagcttagctagaagcggtattgttcttccaagttgattggcaatttgagctgttctatgagtaattcctgtc

SEQ ID NO: 11 - DNA, 9078 bp, Oryza sativa
  source 1..9078: mol_type = genomic DNA
cttcattttctctcctcctctcttccctttcacttggccgtcgtctcctccccccgaccccgccgccgccgacctctctcctccgcgccgccgacgaaccaccgccgccgaatccccctcgccggcggccacccggatctccccagccatgtacggcggcggtaagttcccccctctctcgcccccgtccatccccgagctaaaccctaaaccctagagatctgtggcactggcgctgcttggtttttttcgcagatgaggtctcggccatcgtcatcgacgtggggtcctacagctgcaaggcggggtacgccggtgatgacacccccaaggccgtcttcccctcggtgaggcagaatgcttcttcttcttcttcttcttctcccctcctgggttggctcgctgtaattctgtctcggagttggaactgtgtggtctgtgttttgttggtgagagttcgtgcgggtggtgtcatggaaatgatagggctctgtgcgcaatgcaatcccactggcaattttgtgtgttttctccccataattttgagctgttttaggtcgttgactttgaattctgatttgaaaaaaaaaagaatgatgtgttagtgtgtggcgtcatgatatacagacatatgtttattatttaggtcaagctgtgaattttgctgcgtgcattagttcctcctaggtccccagccacctgattaatggttttattcgagcactggatcttagtctgggaacatgaataacagcagttttttttttaaaaaaaatgttagtagcaggctaactcagatattggatagtaccacagataagacctgcacttaccttttgattttgacatatgcgtgcaaaattatgatgtattgactgcattgttagtttacctttcagctttgtcttagctgcaaacctgtgccattgctcgcataggtagtagttagcagtgttgcatatgtgcactgagagtcaaatgccaaactgaatttttaaagtgctaaaagaatctgcattgtggtttctgtggaattgctacatgttggtactagacgttaacttcaaatgctatgacaggtgaacttctggttactgtgtttgtaacgggaagtacttttcttgtgtattatgtcaaataggattgtactctttctgtcccaaaatataagtatttctagagttttgcacgggtattaaggaagtaggtggaattaaatgggggatatgatttttttgattggttgagatgaggaagtagggggtgaagttactatattttgggatgcggtatttttttgtcttaggttctacagtattattttttaaaatttttttcttcctttagttaacagacttatattggggtaatttgaattcttggagtagattgctaatttctctttgttgccgaggaagtgagaaaacatataatttagtgacatatagcaaaacaatcagctgtaaggtactaaaaagtggtgtgtgaatcacacagaaaaagtgtttttgagtttcactatttgatgtcgctgctaatagattagcatattttcttctcctttttctacataacgtggcagtagttgcaagatatgtcattggttcatgggattatgcatctgagctacctaatgggtaatttggttttagaagttcttactgtggttggtgcacattctgttgtgttaaggttgttggttcaattgagcaaacgggagaaactgatgaagcaaaggcagacaaggaggctgaagctgcatcagattctaagaatggagccaaacctatggatgtggacaaagccaagacaaagcgcaaattgtatgttggtcaagaattggagttcaggagggatcatatggaggttagtttatgcagattctcaagtatcaatattgatgctcatgattttgttaactattgtttactgattctcttcctacccaataggtgatttcaccaatgaaagatggaacagttactgattgggatattgttgacaatatatggaatcatgctttcaggtgagtttaactatctatttgatgtagatctgagtaatgtcgtgccaaaagtgcgcgctgaaagagctggccacacttgtggcaaaacttgactagaaaataaatatctgacatgcggggcacttgagtaacaaggtttggcacattgcttgtgtggtttgccaaacacttgccagttgctgcaaaaggccaaacatgccttccttgattctggggaagtttgggatgaaccatactctctatttaacatagtttgcttagaatctgcaacaaagttcatcttctaggcctctagggcatcttttggatgtcaacatggttactgctttatgccattgcccaccatctttttaccttacatattaatattgtgcttttcaaatatactgatagtgaaattccttcttacgtgtacaaactggataaggctttccttcttgggttatttacttttattggattctgtggcatctctattagctaacattgattaaatactaggatttcctctatatggtgtggatatgcaactattgaagtttctgctttgttagcttttatcttcacactgacttgctctacatttcaggcagcggctattgatcaatcctgaggagcatcctatgttgatagctgaaccatctacaaacacaggacagcaaagagagaagtatgcctatatgttctgtatttaaattaattgtgttgctaagttgcgtcaaacctgaaaaacattgcttgttatatgaactagctgatttatagcacatttatcttccatgactcttatcagtcatgagaactgtattggtaccaggatttactgcatgcttttctacttctccatttaatgtcagaaatgttagtttttctgtgtttctgtacttcaggaatggacaaatatggaattgttgatcaccctgtaaaacttataaataccaataagcacaagctgagatgatatgaatccgagttatatctattcattgcctattatttttgtatggttctatgaaaaagacctgactgtttttctcatgttccatagagcagcagaacttatgtttgagaagtacaaagtgccggcactgttcctagcgaaaaatgcagtatgtatttgtcaaaagtgataattcgtgtaattagtttattagttctaattgttgatttggttgtcaggttctcacatcttttgcatctggacgtgctacatcgttggtagttgacaggtgagcatgtccttaattaaattttatttctgcagctgtaacttactgtctccttgtagataaaatgtttcatttagccttaacttataaacaaatgcattataacttttgaattctgaaatatttttccaccagtaagtgttagggcgttaggcacagtgcacaaatattgggtgtatcttaccttgtcaatcctccttagaatatgatgacaaatgtccatggaagtagaaaatggctgttatatcaaagtcaatctgtcatgcacagtatttcaaatataaaaccaaactacacatagacaaacaagacaaatcctgttgaaactgaacttagaaatcaaaaagcaatttttaatgaccatctgcatcattttttatgaaggatgcgcttgcatccaagggtggaaagcgagaaacactatccttgtctgttctgtcaatcccacttcccacaccattcaagaatcaggacatcaatattttctttactggtcatcaatattgtacttgagttgattgatgctcttctttccccctttactgtatcataaattcctaacatcatcttggtatagggtgtaagcataaccatctaaattctttcagcatgttttaagccatagtatctgattgtctcaaatttgatgcctgacatgtccaccgatgtctctattggactttaatggtgtcaagcattttatgacttatttcatttttgttctcatggcttttgggctttgttatgagaaacattactggaatgagacaatgttgtcattttttgtgcagcggtggtgggtctactgtggttgctgctgttcacgatggttatgtattgcaaaaggtatgatctactatttaatactgattgtcaaggcaaagtgcataatgcactacttgcatgtgtctaattagttatttttaccctttttattctctactttctcatctgaaaactgggaataagggaatcttcttttaagacaataagtttctttttcttgttttacatggacgcttgctcacataacatggacagcactctcaccttgcctctcaggaagtatactttttttcccctacttgttgctaacttatttcatgttgcagtctgtggcgacttctccaattggtggtgaatttttaactgactgtatgatgaaaagcttggagagcaagggcgttgttgtaagcatctctcttgcttaagatagcatactagtcttcttgtatgttcatatccaatttgttcaatgttcaatttgcagataaggcccaggtattcattcaagaagaaggaagtcggccctggcgaatataaggtctagtttatttaacacttcgttgatattcatattttttccctgagagctacaaagttgactgtttaagcttacctttttgttgaaaatcaactataacaatatatgcttagctattggtatgttcgaaattagttcacttgataaaaatatgaaacagtgaaagcagcaaacataaactacaaaaatagttaactacctatggagtgacttcacagtccacacattggcatttgattactggcagaaaaggtggaagatcctgaggggcagtctgtttttttgctgaccttgttttcggcaccgaattaagtcttctccatgccacatctctcaaaatatactttcgtgtccttcctctgaaagataaatttaatcaccaattccttgtatccccaagtgtggatggcatccaaagcatccaaaaagtgaaattagtcaactactacaacacctttagtctcaaacaagttggggtaggctagagatgaaattcaaactgaagcacccaaaccaatgtaccacttaaaagtgcatgcttttggcacatggatagctactctccacaaactcctatcaaaaccaaatccacacacacactgtgagttaccttgagtatgtctatgtctattcatggagaggaatactatggtcattatttcttagcatttatgtgggggcctatttcttggtggtcaaactcatttagtctattattaagggtctgcattattgtgttacttgatcatgattatggttccactttgatacatgtggataccatgatttttgctaatccctggcttctacaagattttgctgccattacactgtatgattgtaagggaaccaacaccatatggattatttgacggcatgcttgtcttttcaggttgtagatcttgatcttccaaacacaacggagagttacaagttatactgcatggtattttcattgacagatcatttatttttgttctctgttgtttaattttgtctgaatgccttcaatggtgatgcttcatatgttcacagagagctattgctagtgatatcaaggagtcagtttgcagggttccagatactgccttcgatggtataatataaacacatttaatttatgaatggggcatttgcaaatttgccaccggttttttcaattttgcaaggatgccactcgagtgacagttctagtggcatttttgcaattttctagtggcagtcttgcaataacgattcaaagtagtggtaaatttgcaattgtccctgccgtacacgcactagttggctattttttattattatctgaagtcctgtaacataaattatctttgttgcagggactgttttaacctgtccttttatgttcttttttttatgttctgctgtttacttttccctgttttattttcatgcagaagtggcatatgcaaacgttcctacaacttcatatgagcttccagatggacagtaagttgtatatcaaaattatttatgcgcatattttttttccagtaggtttagtggtttaattttgtaatggcttattgacgtgttccaatacagttagattatgagctacttttctgcatgtgcatctgctgcatctgtgcatgatacctcagtacaccacaatgattgtttataaaattgatataccacaatgaaaatcaacaatatattgacataaaattaatactccctccatcccaaattataaggcatatatattttttacatggtcttcaatgacatactttgaccattaatttattccatgtcatcttcccaatgaatatgaaattagcatcacatgaaagtacttcaaaatatgaatctggtgatataacatgcataatacttagcattgatatggttagtattattattagtaaaaagttaccgagtttgattttccttaaaaataagggcgtcctataatttgggacagactacagagggagtataccacaatttgaactagttcagtgaaatggaagtcaaatagaagggagaacttgagtgcagcactaagatttattgtcctttaaccttcccatgtaccttcagcttctatatgttgtgactttgcagattggtaggtcatctcatgaacccaacttctttaaattgtcatggtcatttgcatgttattttgagagtggcgcatgatgcaccaagagggtgttgagatgcaccgatatagctgaacttttccttgctattttctacaacattatggttaagattttgtttgtgcaatgtacctttcaagcatctttaacttgctgtctgatatctggacagaaccattgaagttggtgcagacagattcaagattcctgatattctgtttaatccatctctttctcaggtgaggtttgatgaagagaataatacttgctgtacacttgtatttcaggcaggatttgtaactggtgctggtactagattaccttgttccagaacaaaaccagcttgctgttttcttcttcagtagatgctgttgatggcttgaaaaattcttttgaaccatgttgaattgctgactctcacatgcacacgaattttgtgatgcatagactattcctggagttgatggatttgcagattcaatgtcagttcgtggccttccacgaatggtgagttaaatgagagctagacttgcatttactgttgcgcatccctggcagttcttcatattactgaagttgctattgctgttactttctcaggtcattgatagtgtaaataggtgcgatgttgacattcgcaaggaactgctaagcagtattctggtaaatgcctataaattcttcaaccacattttactagctctcttggtgttgccatccatgagcttagtgatatctttcccaaaattctcttgtgaagttctgttaatacaattctaacatctgcaaacatgcattgtggatagctttcaggtggttcatcatcaattctgcagttgaaggagaggctagaaaaagaagtacttgaggtatattttttcttcagaacaaactaggactgccctggcctcatcctgtttatacttcccatttttaaatgtgcaccattttatagcctgtgcagccaaacttttaaatttttaactactaaagtacattgaaaatattccggggttgctacatggagaagtagtggtaggtttgcctttttcatgaaaaagtatattttatcattatatgaataacatataattataaatgcagaacttagaaacagttaaagatttgtggttggagtcctttgatgtctctaatgccatctgttttcaaacagaggaaacaacatataggagtcaagcctatgatctttttctttgttcttgtccaatatggaaatacaagaataaatgaatctcattttttttcttgggatagttaataacgggccagagtgcaagttaatagaactctattctgttttcaggctattgaaaatgtttccttagaccttgtgcaaggcttgttcttatatatacctcaaaatattgcaggaatcttctggtaatactcgtgtaaaggttttggcaagtggaaattcagtagagaggcgattcaggtattcccttttatctttgtagtctttatccttcccaaattcaattgaacattttgctctactgctcactggagaagtttgaatgagtgccttttggctctgcaaagtgcaactctgttgcttgtttttattgcttgaaaagcttaacacatgaactaccaaaatatactgatcactttgttctagtcatacataccttaagtcattttattctgcagtgtttggattggagggagcattctagcatcccttgggtcgttccagcaaatgtggttctccaaagcagagtaagcacaacacagtattttaggttatgtttcccctatctcgtcacggacagctcacaagttaatgtgatttatctcactatagatacgaagaacatggagtatcctacatccaaaggaagtgcccatgaagttgtggagcatcgctacgatttgtgaccaaatttgggtgcatgtgggcaatcgtattacagccaccctgttgttgatctatatcgactattatccgacgatatttatcattatattatgactagttagtttgtagattttgagagggcaacataagaagcaatccagcttaacctgttatgttcttgatggtagattctagttcatgtgttgaatctgttctccctgctgtagaatgtatcgagttgctgctctctactctgtacttttagaataccttttcaatcatttggagtcagctgattgttgtactacttatacgccacctgattagtcatgtcaacaattaaacttgagcactggttaagttaagagtggcctgattgtagttgataatcacattttattcgtagacattgtatgctggatctttatcagccaccgtcagatcatcctctgtaataaatcttcatcagacgtgtgtgccaa

SEQ ID NO: 12 - DNA, 4708 bp, Oryza sativa
  source 1..4708: mol_type = genomic DNA
caataccaacgtcccccaagtctcctcctactcccggccgccgcagcctgcgtgcgtgcgtgtgcgtgcgagagcctacgcctacgacgccaaacacggaaaccaccacgcacgccgagacaaatcccacgataccccgagaaaagcaaaagccaagcccccctctcactcccttctcctcccgccgcgccgcgccgccccgatacctcgcttcttctacaagcttccattcctcggtcggtgccggccgcttcgggcgcgcgtggaggtggttgctgctgctgctgctgctgggggcggcagaagctagtggcggtgggtgtgggatgcccgccgcgacgccgacccgctctcgcctcctcttccccgcgttgcggccgcggccggtggtggttaaagcggacgggggaagcctcgccgctgccggtgactgactggctgactgaccgactgcgccgccgcggtgcggtgggaccacgcgcgacgccatggacgccgcctcccgccccgccgtcgtcatcgacaacggcaccgggtaagcctccctctctctctctctttccagatctgcgcgcggagagcgtgcgccgcggcgaatctgaggcgggtgatgagaatgggtggcgcgcgcgcgcaggtacacgaagatggggttcgccgggaacgtggagccctgcttcatcacccccaccgtcgtcgccgtcaacgacaccttcgccggccagaccagggccaacaccaccaaggggaactggatggcgcagcacagcgccggcgtcatggccgatctcgacttcttcatcggggaggacgccctggcccgctcccgctccagcaacacctacaacctcagctatccaattcacaatggccaggtttgtgcgcgcgcgcgcgagcgagcgttaatttcctcttctgacactctgcgttgctatcttagtttgcggagcttcatttactcaagctgatatgggctagatattcaggttgagaattgggacaccatggagaggttctggcagcagtgcattttcaattacctgcggtgtgatccggaggatcactattttctgctcaccgagagccccctgactcctcccgagacccgcgagtacaccggggagatcatgtttgagactttcaatgtgcctggtctgtacatagcgtgccagccggttcttgccctcgcagcaggatacaccaccacaaaggttagtagagcaagaattccttgagatgagaacatgaatttcgttctcaaggccatgtttatgttgtagttgaactgttttattacacgctttcaatatgcaatatttctgcttaaccttaatttgataggtgaaagagactacattattgaaatatttacgtttccaataaattttaattctatagtggtttttctgtttcatttgaaagctcattgtgttggcatcttatttctagccatgcatggactcttgagcttcgtagttgtgcttagtttgctctacaatactccttccatcccacaatactgtctttctggtttgtttagcacaaattaaggtttagcaatcaaagactaaagtgcctctcatttgaatggaattgtgaggttgttgaggatagaatgtgtagaaatttgaataggaggtgattgattggacatatagtactcttaagtgacaagtattgtgggataaattttaaaccctaaagagacaactattttgggacggaggaagtactacattatttgcccctctttttcctttcgtctatgttgagagatatatttatgaggaatttcatgctttgttttcagtgtgaaatgacaggtgttgtagtcgatgtgggtgatggggctacccacattgttcctgttgctgatggttatgttataggaagcagcatcagatcaattccaattacaggcaaggatgttacccagtttattcagcaactcttaaaggtagttaccattgctttcttgtgggccgtcacaagatagtacttaaccttctatttgtcaacagatgtcactgatcttacattactgtggatctatgcctttgagagtccaaatgtccatcataactgcacaaggaaatcaaagattcatgaaaataacagccacaaataatgaaagggataaaatgcatgaaatagaggtagaattggtggaaagtaactgtcaatttttatctaatgatgcacaataaattccactcaaagttttacaagcaactccagcctgcagctgcaatcatgcgccatggcaaattttgtaaacacacctgagattatttgagtcacctcaccgtggttgtcaaataagcatatcaagtatatcattctgaacaaatgaatacacatggttaagactagaggacaagctgaaattatcgttacctgtatgtgatgagagagacaacttctcttcttgtgccatttaacctgcatgtgaaattgacttgggacttgggagtgtgatatatcaagaaaggatatataaatatataacaagtttacctcataattttcttgagattttcatattttatatagcgaatctgcataatggcagtgcacttataagtcactgagccaattagttcttgcaggaaagaggtgagcacattccaccagaagaatcttttgatgtggcaaggagagtgaaagaaatgtactgctatacatgttcagatattgtgaaggtattaactactacaataaatacatgaactgtcaattattgaaacatggatagtatatgttctcgtttattctaggatgagtgttacttcaaaaggaaggattgcttttacctcataatagcattgcagttgactgactgtcacagttatagcagcctaggcattggcatttaaggcttaccctgcctggaatctaattttgtaaagcactgttccagcatgcttgatgtcaaacaatgcatctgctttcctctgattcactttttcctgcaactggtgattgttttcagtatcgaatatgttgtctcggttcttcccagctttgaaccattgactttgttatttgtacgacaaaaaatagagtccctaagagatgaaaagaaaaataataatataactttattgttgcctttttaggaatttaataagcatgacagagagcccaataagtacataaagcactggagtggcatcaaaccaaaaactggtgccaaatacacctgcgacattggatatgaacgcttcctagggcctgaggtaattgattttgcattaatgtgttcaccattaactgtggcttctacaatgtaacatttgatttaggttcaaaacttaactgcgatcataatttaactccaattcatggataaaccagtttgagttcaggctttatgttcataaatataactgctttgtacatgatatctctagtagttctgatgcattttctaactaaacattttgattgcactatcattttaatctaatttccccacgttgctgtgaaccatgcagattttcttccaccctgagatttacaacaatgacttcaccactcctttgcatgtagttattgacaagtgcatccaatcatccccaattgacacaagaagggctctttataaggtttgtgttatcaaaatgccgtcttatgattcaaaatatcacagtggttctgagtttcattttattggacagaatattgtcttgtccgggggatcaactatgtttaaggatttccacaggaggctgcagcgggacctaaaaaagatagtggatgcacgagtccttgcatctaatgctcgacttggtggagatgcaaaggtacaaacttttcatgtttgctctggctctctcctgattgcagaagaacactggccaaaccagaaactttattgtgatattggaacttggaagctacagctacattctgtttatttcaggcccaacctatagaagtaaatgtagttagccatcctattcaaagatatgctgtctggtttggtggttctgtgcttgcctctaccgctgaattctacgaggtattcaaacttctatttctatgtacagtagtaatgaacactcatatcacttgaaactagtgcatagcgtttacttttgcaagttgtttccaaagcttaaatttttttgttggaatatatccccatattcggggtttctttttcctttttccattttagaaattaaagctaattctggtagttttcccaaccaggcttgccacacaaaagcagagtatgaagagtatggcgcaagcatctgccggacgaatcctgttttcaaagggatgtactaaaccacggcgcaaagcttctgtagacatcaccagtggcacccccaacgcgatccagctgcactgcccagcatggtacaactgacgttggggaccgagggggatcctgcagtagcctcgctgttatgagttgtacaaatctagcaggcgcatagatagatccactctttcggtaatacattccacatgttcatcagtttttgctagcctagcagcaaaaacaatatgaccgaacggcatgggcaaaatatatgtttcatgctgctgtataatctttgttggtgacggtgtagcattacgacattgttttttttgttggtgatttggttttgatctttgtatgtctcatgcttattacgtagtattaactccattccgaaatatgaaatataagggattttgacgatacaaa

SEQ ID NO: 13 - DNA, 4906 bp, Oryza sativa
  source 1..4906: mol_type = genomic DNA
caaccccgtccccgtccctcccctactctctcgccttctgttcctccccctctcccttccaacttcccaagcgcgcgcggggagacgatcggcgacggcgacggcgaggcggaatggacagcgggaacgtggtggtgtgcgacaacggcaccggggtaagcccgccctccccccctcctcccgcagcctgatccctgatccagcgtggcgacctccctccctccctctctacctccacgctcctgcccctagatctgcaccccctccgtcccggttcttcttcttggacggtttcttggatttcttctgaaatttcctgaatatatacgataggattgtttctctctctttggttggggagtaattagcatctgtgctctagattcatttgtgccgaataagttttgctgcttactactgagctgtaattaatctaggatgaaatgatacgtgtgcacattgcaagaaattgaagggggaaattgctctagtatggtggaattattgttctccacataggcaggaaaaattgctgtaatacgatgagattattgttctctgttgaatctttagataatgtccttccaaatgcggaactggaatagataatgttcattcatataaaccacattagtttgatattttgcggtccaaaagaaattatgctgttgtctttggcttagtttctgttaagtattttccacatcattcctgtggcttgatgttcgatatgcttaaagccttaaacaacagcagaacatatcatattcataggtgatcttgttaatttctaattcggtacctaatggctaatgttgcagtatgtaaagtgtggctttgcgggagagaacttccctacatctgtgttcccttgtgttgttgggcgaccattgctccgttatgaggagtcactccaggagcaggaattgacggtctgaaatcaatgtctatctttgtgtttctggcattccctcattctgtctctctctcagtacaccttataattgtgattgtgttccacgcaggatattgtggttggagcggcttgtgctgacttgaggcatcaacttgacgtatcatatcctgttacaaatgggattgttcaaagttgggatgatatgggccatatatgggatcatgcattttacagtgagctgaaagtatgacttttcatatgatttatattactttaacatcagacccttttaaatttatatgctcataattcatcaacattctccgttatgtgtcttgaaatctcttagctctaggtaaatcaatgtatttctattttgtttctttaggttgatccttctgagtgtaaaattctactgacagatccaccactcaatcctgtgaaaaatcgtgaaaaaatggtaggttgttttctcccatctggctgttctgtactatgaaatttgttttttaagatatcactaactagcaaattgaatcctacgataaatagattgagacaatgtttgagaaatacaactttgctggggtattcatccaggtccaagctgttctttcgctatatgctcaaggtactctctctctctctctccccttccccccctctcagtatacagacacatgtatgagcttgcacacctacaaacacaaaatgtactggttcttttcttaacatgtattatgtttgtatcctttccaggtttgctgactggacttgtcatagactctggtgatggtgtcactcatgtggtatgataataatagtcttccctatattgtacaatctacaaagatttgaaatgcagagattccatttctgttaatcttgtggtgcactacaaaaatatctatctgatgcatgtttataattttctactgtgctaatgggtattcctcaactcaacaactaagaggatctacctttttttgttgatccagtgaagatgtatgaccaagactatatgcataccttgtttccttgtaggcggcttagtagaaatcacagccattgaacaccataatctatgatttctggtcaaaatgtcgatcatggaaataaaatgataatttaaactatactccatagtccatagttagtatggcatgctagtgcccgtttagttattctcgcacatagccagttaacattgtaaggttatcaccaacgtgtgtagtaagtagtaagcacaaaaagttaagcaattgaatactgactattgtcaatttgcaatgtgaaagaaagttttatctagatttacttttgcccgtcatgtttattatgatccaggtgccggtagttgatggattctcttacccacatattacaaaaagaatgaatgtagctggaaggcacataacatcttatcttgttgatctactctcaagaagagggtaatactctttatcatttttatatgtttgtagataaaagatgctctgaaaacacaggcttatgcaattgtttgcttcagtgtttttcttatcaacttaatttcgtgctttaaaggtatgctatgaacaaatctgccgactttgaaacagtccgggaaataaaagagaaactatgttatttaaggtcagttgctttattgttcttaattgttttcgctatagcttgctgtcacatttcatagaattgaaaagggaaaatatgtacagctatgattacaagcgtgaataccagctaggacttgaaaccactatccttgtcaaaagctacactgtaagtatgttaacctgctttgtttctatttggtccctttttgtattattggctgaacttttgtcatcagcttccagatggaagggtaatcaaagtgggcactgaacggtttcaagctcctgaggctctttttactcctgtaagcttgtactcatactattctttcatagcttgctgatatacattaaggcatgcatttctctgttaggatcagtaccaacataacattgataaaacatttgttgagcaggaactcatagatgttgagggtgatggaatggcagatatggcgttccgttgcattcaagaaatggacatcgacaaccggatgacagtatacagcttacccatacaatatgctatattttgttgctccaatcttttcacttgcttttgtttatcttcaagtatttatttgtaacattgttgatgaattgatgagttagatatagaacctctgtagtcttcaattgaaatttcgaaggcacactttgaattcaactacacatggcttgtctagtgaatttgtgcataagataatctttgataatttaggattactttgttttgttatttggtagcaacttgataagaccatggttttgcataaaaaatccacttacatatatacatgatttttatgttgttgtcttaaattagaacttgcacaggtaaacaccataagttgaattactgtcaaatgctgaacacacttccaaatgttgataatttttcatatttagtacatgtgtatgtgttaatgtaaattaagtcaagaagggacaaataaatgccagttatgttagtctctatacttgattaattgtattttaagttgttatgaagtacttctagataagcattggatcatgtgttcttctctcattggatgtctggataacatcttgcagctttatcaacatattgtcctgagtgggggaagtaccatgtatcctggtctgccaagtcggtaagatttgacaaacatatcccgctctgtcttcttttgtttactacagtacatattaacgattagtttcaaacaacactatttttacactgaagctcacatcatttttggtggtctatgccactctgattttttgcctgttctatttcttaccaatgtatgtgtttagctgtttttataagcttcaatattgggtatgacttaacacattacaacatttttgaagactagagaaggaaatgcttgatcgctatcttgatgtggttctgaagggaaacaaagatggactgaaggtaatatttttttgtggttattttgtagctgacaacagttgaaaatttcataagcttattgaaatcaaacacaaggaaattcccaagttttttttccagtgcaacacattttcttattcaataatggatgttgtcttttcagtaaggaatgtgaccattttcacttctgtctatgtgcagaaattgcgtttgcggatagaggatccgccacggagaaaacacatggtttacctgggtggtgcagtactcgctggaatcatgaaggtaatatacttttcccacagcgttatatatctatcggttattataagcaaagccttgggacaaagtagagaggtgaacagaaaaggagcacaaaagatgaaatcatgcattactgtgtgtgcattgtcgcatgggaatctgctcattttgctttattactttgctgacggctgttcacctagcaggattcacctgaattctggattacaaggcaggaataccaggaagaaggccttgcgtgcctaaggaagtgtggacaagcatagccgtcgagtatgttcctatgatcctacctagattctcatcaacagcagatgtgaaaggctctctcattctgtttgcaggagacaaaaaggaaacctatgtttagatgatggatgcacattacttgtagaaagatgagcacatagtgttgtttgttgtccctattgttcaggatacttgttggtgcatgttgtagcctagaagccactatgaacacaaactcaccatataaccatgatgagcaaacattagatatatttcattttctattggtaatatacctatgaacacaacacatatttctacttactatattatgtactggtgagctgatgctcttcatttggtccctgtactgctagggcaaatcaatttactgatagggaaagtcaatttacaacgaagcccttaacatta

SEQ ID NO: 14 - DNA, 5282 bp, Oryza sativa
  source 1..5282: mol_type = genomic DNA
tccaacggccctccccgatttccccgaaacgctactacccctccgccacagcgtccacacccgcgccgccgccgccctcaccctcgccgccgcgcatcccgcggtcccaccgtcgccgattccaccgctgccacggacaaccccgccgcccctttccttcctcgccgtgggagcgccccccccctccaggttggctagcagctagctccgccggccgcccttccccgatgggggcagcggcgtaggcgccgccatcagccgccgtacgtatgtgagcggcgcctgcgcacgcctccagctggtccgcgcgaggtaactgtgtggggtaaaattcctctctagtcttcgctttcgccatatcgcattttcgagaatacctaatgccgtagtaagccatacgggggtcgttttattgcttttatgcttaagtcacacacttcgagcaagtctattgaatctatactcgggtagaagtaatgcgcgctcatctccaacgcctattttgcaaaagaagaagaagaagcagaagagagaaacagtggcttttgtactactcttgcacatagaaccccttctcgacttgctatcaacagttggtttgaaacttagcatttctttgttatgcgcagttttgctgaaccagatgccgatgcagtgacgattcgttggccgaggatcgcgttcttataggcccgatttgcaaaggtactactgcagtggcggagcttgagagagattctagatggggccagctattatagagtggaaatgttggtaatggcagaagtagaatttgtagaagggctattcatattgtaaaataatttccaagcatgtttttgttaagaaaaaatatatgttatacctaagtatagctgttaaacaggtggaaaaggatcactcaagttataaaagacaacatatcaaagttattgtaaattaacaggttttaagagagctattttattaagataaaaatgtttgtcatccataggaggaaaatgatttagtaagcaattaaactgaagaaaaagaatggacttctcaggatttgaacaccaaacttccaagaaagcatctgccctcttcacttgctaatcaattgagcagaaaataaattttcttactagatacttgttaagtatatatgtgtttgctgccaaagctgagggggcaacacccaggttggcctccatgaagctccacctctgtactattagctgttgttggaactatattggtcgcatcaagcttccgccaatgtttgcagggttaaaatacttggtggtctgtcatgctgtatgttgatgttatgcattgcttttggtacaaccgagttcctttttcctgactggttccatggttggttgagatatggatgctatgtattgttctttaatgttacactttagcaaaattttcccagattacgtaagcaactactccatccattttatattataagtcgttttgatttttttcctagtcaaactttttttaagttggaccaagtttatagaaaaacataatagtattttaaacacattatattatcaaaatatattcaatgttagatttaatgaaactaatttggtgttttagatgttgctaattttttctaacttataatatgaaacggagggagtattgattacaaacatgatggctacttcatttgattttatttagcattagctgtttcaatcttggcaatttaccatttccatctgttgtgtggttttatttatgtaggagtgcttgtaaatccaatcataccatttcgattttcatttgaccaaggataggcaagaataggaggaaaaaggagagtggcatataatgacgggtggatcaggtgttgtggtgctagacaatgggggtggtcttctgaaggctggatttggtggggacatgaatccgactgctgttgtccccaactgtatggccaagccccctggttccaagaaatggctagttgctgaccagctgcaggcacaagatgttgatgttactggcatgacattgaggcgtcctattgatcgtggctatctcatcaatcaagaagtgcaacgggaggtgtgggagcgggttatacgcaacctactgcaggtggatcctaacaactcatcgttgctactggtggaaccacagttcaaccctccagcactgcagcatgcaaccgatgagcttgtttttgaggagcttggtttcaaatctctttgtgttgcagatgccccttcccttgttcacctttatgaggctagccgccagccatcgctgtttcgagctcaatgtagccttgttgttgactgtggcttctctttcactcatgcatctcccgtgcttcaaaactttacactgaattatgctgtgcggcgcatggaccttggtggaaaggccctcacaaactatctcaaagagctcatttcatatcgctcccttaatgtcatggatgaaacactcctcattgatgatgcaaaggaaaaactatgctttgtatcccttgatgtccctggtgatcttcgtcttgccaggtctgttgccattctcatcccaccacatatggatacatgcttgcctattgtttagggttcaaatttaacctgatttcaagtttatcttcaaggtcaaatggtccttcacacagaaagtcctgctaagaatgttttgcttgtgtaaccagcttaatgagatgtagatagcttagtatcttatctttggaacttagtgctgtagttgacaaaggtggctttgtgtttcatatgtatgtatgaagggttggtatttcctttattagaagctagattttgaaactttgaattgcacttctgggacagcacaatcactgattgagatggtaatagtttttcattaaataattagttggtccacgtgttgaatacagttgaggtttttatccatctaagtttcaattctaaatagtttttgtagtgtctttcctagtatctaagttacaaacatgctatgcaattatttgcaggttatcatctaatgacaacccttttagatgctcctacattctccctgatggtataacatacaagaaagggtttgtgaaggacttggatgaggcatgcagatacagctctctgcctgctaatggagaatcggttagaaaggatagttctgacagcgataggagcaagtttgaggataagaaaaagcctgaacttagtcaaaatgtaacatctcgagctataattacatgcttaatattatttggcatcatctaactgggttgttcctattcaggaatttgtgttgaccaatgagaggttcctagtgccagagatgcttttccatccaattgatctgggtcagcagatctactaaaatgtcatgtgtactttgagctgttcattgttgctctgttaatctcactactgtgcatgttcataggtatgaatcaagctgggcttgctgagtgcatagttcgtgctatacaagcttgccacccacatcttcaacctgtgctttttgagaggtatcatttatttattgtctgaattctgaacctatcttgacatttgaatatacatccatgttactatgtgttggtttgtttccactctccagaattatcctgacaggaggaagcacgctattccctcgattcaccgaaagattgtaagttgatctttttattatttttgtacatcagaaataccatctcaaggggtgtgggatttattgtttgctattcacagggaaaaggaacttcgtcctcttgtgcctgatgactaccaagtaaagataattgctcaggaggagtatgtaccactctatctcttttgcacacgtgcgctgttggacatgtatagtcaccaacttaccattaacatcctgttgctttgtctagcccaattcttggtgcctggagaggtggatctcttttggcgcacaggcctgattttgaatcaatgtgcattacaaaatcagagtatgaagagatgggttcaatgcggtgccgtcgtagattctttcactgaaagttgtgtgccagcagctcagtagaagtgcaatttgtaagtatgattcagcactatctagttcaggtcttgaagaaatactcattaattaggcaaacgagaagtttggttctagaaggtaatgatgcacaattttaacacgtggtcatttttttacataggaattagaagctattactccatgtatctggtcccccttattactggcaaccaattctttcagccttcctaccagctaaatatgcagatatagtccttaccagggaaaacctttgtggtctaacaccctcggaacacagttgctctgagataaatggtgaattttgcttttctgctcggtgaaaagttttcttaatttttttccgagtaaacagcgtgcatggaaatattttattagtcatttactctggcaatacctgacctgtgtacgccacacagagctttagtttagaaacaacagtatgcatgatcgtcttttagaagcataaatattagtatgttagtttgtatattcagtctctggaattttcgagtcttctgtccacctttgagctgaaaatgaccttgctgatcgtgtgattggcttgaatggtatattaactattgctagtacgctgagcctatgagatatgcacctattcacttgtgagatatcctctaaaaatgtctttgttcaaaaaaaaaaatcctctagtgtttactgaaatgcacttatgtcatcaaaattttacgagcaacattgctggcacttcacgtagcaaactagcaatgatttccagataagagtcacaaaggaacaacacacacacacacacacacacacacactccgactgctgatacagaatcttacagatgtcaccagcaagagttcagccacaagaacagaaccactagtacgtagataacaagtgcagcgacatgcatggtaacaattgaattgccaactctcagataacaccaggactcccctcaggcaaccatggttaccttcttcatccctcatccctcaaccttgtcgcaggtgtctctcaggcgtatcttcggacctcaggatccagtacttctccatgggatgatgggaatgacctcctgagccttcagaattttgtgcaatgttcctaggatagaagtcggatgtattccttaccatcgaaactgcacagtttatgaaaccaaaattacatgtcttttctagataatcgattaattagcgtataaaactcgaatacatgtagaactgattggtgcataaaagagggtcagttatgta

SEQ ID NO: 15 - DNA, 15441 bp, Oryza sativa
  source 1..15441: mol_type = genomic DNA
gccgggccccggcccattttagcagctatactcccagcgccgctcggccgccggcgaccacgagcgcgtccccgacgaggccgtcgcctccgactccggcgctcccttcccttcccttccgacgcgcgcgacgccttctccggggagaaaatatggtaggctccccatggcttctctcccctctcaatcgcggccaaaattccactgggttttctgctacttttgagccataaatccccgagaaaccctaactaacaagtgattttccatcgcaggattacctcaagacggtggttccatcacagctgatggccgagcgcggcgccaacctcgtcgtcatcaacccaggtgcgcccctccggaaaccctagcccctgatatcaatctggtcatcccctcctcttttgggtgctatttcgtatggccaagtccttcttgagattcatgccttccaccctccaatatcgagaatatttggacgatttgaatgggttgatgtgttcttttggatgaaagagttggaagtagttggacgaaatgcataaagcgcaaccgtattagtaaagtaatttttgtgtgataattttgtggttgtgtgctgacaaattatcttcgcagcagctaggtgcctgccttatctagatgcagttttgctgccagttcaattcgtagttgctttcagctgaccaatcaattatccgtgttctctaggatcttcaaatgtgcgcattgggttcgcaagtcaggatgttccattcaatataccgcactgcattgctcgacatatcactcagcagaaggatgatacaccaaggctttctgtgcgagacaaggtggtgcaaatattgggaggtttgtgatgcaatgcaatttatctttatcctaattgaacgacattcatgtttatttgcagatgctcaactgccatgcaactccatcgcagaatgcagagcgggagagggcatatgatattgtaaaaagcaaacacttggcgttgtttctttttggattatgtttctacttgagctaatgaggtgatagacttgcagattgcatcgctgctcaaaataccctttttggatgaagacatgccttcagcgaaccaggcgttacctcctaaggtaggacgcacgatctttaagtcttacctatctggttgtacggttataggcaatgagagtgaactacagaactagaggaatctgctgagaatatagtagcacatgctccaccctactggatcaactacagtattattgggtttaaaaattcgagttccaccctattgcaagatccagatgtccttttgctcttgtatggaacaaaaaggctttaagatgggctcattatattatgtctttggtgttgatgtttttttcttagcagccaaatgtatgttacattatgtacaattaagtaaactatgtgatcttctaatcctttacaaaggacccaacaaaatgacatgcacacatctatgtagatcaattcacaaaagatcacatgttatggaactaaacatcacaacaactaactccttttcatgagtaaagatatgctcgggcactttggtcttaatgcatagccatgatcaggtgggccacagaaatcctgcttcttgcccatcagtgccttgattgggtgagttagcacttttcagtgaacaaagaaaaatagcattggtagagggagaaaatggggagatagagtggatattgcttgttatcctttgtaagcaatgatacctctcctgcctctaagctgaaggcagaaactaaagaatagcaggaagcttattcttgtaagtcgacttcacctagatatggttcaggattgacacaataaaacactgtatttcactaattaatataagctcaaaattctagttcaatgttaagtctatgtttttgcaaatagatccttgatatccaatatccatgaaaaacttgaggggctatcaaatatataaaatactcataaggtgtgttgaaaagagaaaattgatagtgacattcatttatattgtacagtgaatctttgaaaatattgcaaagtgaactgattagttcatcactttctccaactcttctggatttatagattatttttgaattattcttttgtctaatttgaaagatacttttatcttttcatctttgggtgtagctataaatgactacaactgttcgattttgcagtatagctctgttagatggtttgagtgtttgacatcaatgttcttgagaccaaacttgttttgtttaataaagatcctagtgttgtttctatatgctgatatcattgcatttacctcttcagatgggacgtgttgatgccctttcttcacagcaaaacaaagatgatagtaaattcacatggacagatgtaatggacagaagtattaaatcatctacaccaattggtactgtctgatcattttgcttgttttatggggacacttcattctttgttttctcttttcatagttgtccgttagctgaagctaaattgtatactttaagttagggcactgtttgtgtagatatgcttgtccatttggaagttgtacatgaatgttatttgatatggcttattttatttgacattataattcatttgttatgccttatgtggaacacccccagccaaatgggtggtaatcctcagattggaagttaacttggatttgggcagtgtttacacaattggagtcaaattcaaatgtagaaacttggggtcaaaccatttgtgcgcgcatttgttggaaaggagggaagagggcagaatcctatgcaagctgccatgcgcgtatcaatgtctgtggcctgtgcctgagcttatggcagtagtgaactttgtaccctgtaggaccattgcattatgatttgtggctagtttagctggagcttggagcgagctaattctgttattttgttggatttaactcttatgttttgttatggtatttctttcccattggatatatttggattggaactttgcagtagctatattgatgtggacattgtacttcagaaacaattgtaactgttatctgaaaaggtggaagcttagtcgaaatttgcatcccattctttttacatagcatgtatcgtctagctgcttaagattattggattgggcatagcatgggtattagtggatttgtttaattccagggagattagaagagcagttttgcatcaatagtgaagtaacctatgttttacctatactattttatgatatcaatgttttgctgaactactcaaattggtcagaaaggccagttgacaaggatgctgacgtggatcccctgcaaagatcaactcctgacgatactgagcctaattctgaagaaaacatgtataaagaaataatatttggagaggatgctttgaaaatcccaccttctgagtcatactgtctgagtcacccgatcaggagaggccatttcaatatttctcaggattattcattacatcaggtattagtatgtgacttaattattatatgccattttccttaagctcattcagttataaacttatagtaatgctccttctggatgtaattgacaacacagccatttcaaatgattaagctaggctgtggttacattcaagataatcagtaaggaacggaacatgatatttgttggaacattgtttattaagtaaaaatgtattaactgatttgcattacaacttcggtagaaaggatttgctcaaatgtattgaacaaagctgacgccatccacaaatctgttagaaaatttggcagaatctcccctgtatttaattacatccacgacaaacagtttataaaaataattaaacatcacttaacccgtagacatgatagcacacaaactctcacagtataaaagtaaacaataattacaaagccaaatgtgaactattcaaatattaaggaactatgtttagtttaattctgtgagctgtggagataaggggtgctacttcctgcccatacatactggatacctaaaaccaaataaaacaggtgagtataatatactcagcaagtatagtatggaactacagaacggaaatagaaaaacatacacacagcaaattgcaataaaaaaacacatttttctttcaagacaaaggattcattttattttcttcgaaactcagcaagtatagtgccactagtaagccctagctctgcttacttggctttgctggcaaatgctctaaagatgtattcactcttgtcccgcctattgtttcaaggaaaagaaaattttgtttcaaagacaagaaaaataatctcttttgtcttgaaagaaaaagagttagtagttttagtgtgttctgtgtagcactctaggtttgtggatacggtacctagggtgttatatttctccatcttaaaacacatatcaggaacatgttgaaacaaagcgttagtattttctttgatctcaatatcccttcatcacttctctctttttttcgttttttttcttttttgtgatctgcaatcaagtccaatattgttcgatgctttagcatgcacccaatttctcagacctacccaaaatgggtcaagtggttcatcttctgaaaaagcaatatacgtgatgaagtacaattgtgatgaaagaatgagatactaacgttctgaatccactagaattattatttacactttctggtatccatgcctacttactggttcttcttcttcttttttctgcataattaataaaacaattaatcaatcagtttatgctgcttgtaaggcagcatttgtacagccttgtagtgccatattgtaattttaggcactgttgattttgtgttcaaaagttaaaaatttattccaaattatctgttatttcttcctcagtttttatctctgatgtgatgtatttgtttatgaatgacataccatataaaatgttcaaaacaaaatctggctatcaaatttttagaaatattaaaatctggatttgatggctgatattttgtatgccaaaagagaaaactaagtgacaactctttattttgaatttgtcataaacctgtgtatgctgccttcttttttcttatgaacagcatagtatcacaatgctagaccatctttttaattaaaaaaagtgcaggttttagaagatttgcgcactatttggaactggatattgacagaaaaattgcatataaatccaagagatcggcatctgtattctgcaattcttgttctaggagagacatttgataaccgaggtatttcttctttcaagtacatatgtttcctttgacttgtcattttggatattaatgcagtccccaatactgtacctttgtccttaatgctctagttactccctgtcccaaaatataacgcacacaattttaggaaaaatcaacaatttcaacatttgactaataataattgaagtaatatatgtttagttctatgcatgtgatgttattaaatttgtatttgaaagttctttcataagatgtttattttgtaattgttacatcatatattacgatgggaattatttgtcaaagctcttcgttggagaccgtgtaaaaaagttataggtttatattttggggcggaatgagtaaatgttagcagaaatattttaaaactataagcaaaggatctatctggtctcactactgcgggtttagattgatcttaacattctcactataagcaaaggatctatttggtctcacatgcttttcctttattctctagttagatgttggcaaaaagttttaaaagataaggaaaattctatttaaccccaaactaccatgatgcttaaacttacaaaatcagatcaaagtgaataaaccctgaactagttctggatggtggttttgccctcatctactagcacacaatatattcatgttctgatggcatcttgtgctatctgtgatttagtccacaactctgccctgtctgcttgacactggctgtgagaatctggaatgatctttcataatactgttctgcattgaagtagtcttgaattgacagatgaggaaaatactggccacaaagttgacatgtaccctatcttatgtttgtttttagtttttacccttttactataaattatattgtataatgcgtgttgcataacacttttgagcaagatttttctttttgctgatttatctggtcaaaggaagttaattattttattccatttcagaaatcaaggaaatgttgtcaatcgtactttgcgatttgggttttagcacagcagtgatacatcaggttagcttttgcatccaatcactgggcatttttcatttttctttcttttcacattctggatgtaagaatactctgttttacatggaaaatctaattaattggatcgttcattcgtaaagtgggacaaacgaaactccacatataaattgatttccatgtactacagtactatctattcctctgaagtgctccaataagtgtgacaagacacaaatttgtaaagatgggatgctagaattttgtcattttgaaagtttgcatcatttttaaggaacattggaattggtatgaaagtacttggatgtacacttggaaaaccattctccaaaaagggatatcatttagaattgtacacttcaatagccacagggtggtttccactattctgatgttattgttgagttaatcaatgaaggttgtattcactgaatggattgtattgtgctcctgtgtttatgctttgatgcattattgtctttgttaataactaaatatactgctgagagagtggccaacttgttaaaacagttgagatatttcggttgcaatgtggatacttttcagagttcagatttgtgccagagcaggaattttcttagcacagcagatatagttgctgaacagttttttcttgtaccttcattagataacatttcaatgtttggtccaatcccagagtggaactaagcccttagcctactgcaaaaagtactgcttgtagcccagcttgacactgattatagatgctaattattctggttttaaaccagtccatacttcaccagcgcacaaaataagggacccatgaatgtttcatattcttgggctatatgaacgacagaatttcacatctaaaagctaggatttaacttgttttttgtgctcgaaatcttaagttgacgctggctcagctaggggaccagctggtggattctaccttctgtgttcttttagtagttattgactgattgtctgacaacaggtttaatgattctaatgcggaactacaaattgagaccggttaggttagggaacttcctacttgcacggctgtataaggcttgtagaagaatagccattcaaccaagttatgtgtttgatgatccacaagttgagacattgaacatccttatttcttctgtatatgctttgataggaagctctagctgcagcatttggaaatggcttgtcgacatcttgtgtggtcaacattggcgcgcaagttacacaagtagtttgtgttgaggtaataaccgtagcattttctttggtctttcactagccattgagaaatgagggttgtattcttaagtcgtaatatgaatagcttttctttagctttctagatactgcttacgtaccaatatattgtcctccttgatgtatgcaggatggtgttgctttaccccacacagccctggcgcttccatacggtggagatgtatgccctaaattatactgtttgacctacacaaccaatcttagttactttggataatccgccttttatgttcattctatttaatagtttatcattactatgaaaattcattgtttgtgttcattgtattgtatcacattatatcatttgtttagagtatatcgctatggtcatgcaatctgtgtagacatcaataatttactaggaagaccaagctttagcattaagtttgttacgatattaagtttgcttctgcctttggtttatattgtttttgtttagtgttggttaacaagttttccttttttttttgtgtgtgtttctttctccaatttgttatgctaaatggtctggtccaatgctgctagccacaacgccatctatacttgttattctttgtttttacttttttagagctattatttgctcctatttcaaaaaatatgcgtttgtgcagtttctgtgtagcgatttagtctgatatcagtgtttgaaactgaaagtagacattaaaaacttctcagcgagtctagtctggttctgtttttctttcactgctgccagtaaccagtgaaaaatctgctgaaacatggattaggatattgagttggtatttgaaatatgaccagaaaccatctagataatttttcgcatctgggaattttgtttcttagtcaagtaatataggaaattcctgtacaatttgagatcgcctctgtttttctgtccctgcttttaaaggggttttgtagttagcactaatttgagattgtcttttcaattagttatttatgacatgattatttgatagcactgttgttggtctaatcagtatttacttatcatcttccttgcggcaaggcagtctgagttctttttaatacattacacatcagctttgctatcctttttcttttgtaggacatatctagatgccttctttgggttcaacgtcgtcattgcacatggccaaacttccaaactgatccagtgaacaagcctatagatatgctaatgctcaacaaactaaaagagtcatacagccagataagagtaagtggcttatacttatttgcattcattctaataagggcaacagatggcagaggtagtgtgtgctccagttaacatttccatctccagtgtatagcagattgaaattcaacatcttcagaacaaccaccaaaaaagaacaataaaaatataacaccagtagcattgaataatggtttctaatgtcacggtatagaattcctgttatgctttaggtgcaaatctctagaatgacaatgagtcggtgatttggctcgagtggtatatttgtgtagcttgtatcatatgagttactattagtcttgtctcctgtcagttttcggctcatccctttactttttccgtgactttcatgaatatgtaaacacaaacgcatatctgtagtcttattttctttatcatgagttgatcatccaacagcacaaaaataaattcaacataaaaatggatctggttgcttgtttagattctagttacatatcttgtactcacttgtttgaaaacagtgtaataaaatggacagagctatattatgttaaacaacaaaacaaaagagatcgtatatgagggattacatatatatttcaaaggacaattcgcacctgaaccatgatctcaacctacatttttctttttcacagagtggaagttttgatgctgtcagtgttgttcattcatatgagcatgaaaaatcagttggtcatcagaaaacaaagctatcggctctgaatgtaatccattactatttactcctctctttctcttatgtgcttattttttccttttttgggtttatcatcaaaaactagcacaggtagttgagctacagtccaagaacaatgctggtcttcatttcattatttcgtcttagttgatttatgtatgccttttttgtgattaaataggtacctcctatggggctactttatccaagggttcttgtcccagaagaataccctccacctcctcgatcttggtaatattttgattcatctcggtagtttgggtattgtgtgtttggatttgattactttacagtagtttttctgcctgcaggttccaagattatgatgacatgttagaagatacatggcaaacaagtgacagtctttactcaagtgggaatggtgggttcggtatgtgggacaattatccgatgtttcccaccagattaaaaaagtttgataacatcggtcttgtagaagccattgttagtagtatcctttcgacaggtagtgtctttactcttccttattattttgctccccttatcttgaaacttttctaacacctgctgaccacaggacgtattgagcttcaaaggaagctattctgcagcattcagctggtaaagtaccaggcgtctttttagtcaatacttcaacactgttaattcaaagtaagttgagaggagtgcttatgtggcttttcaggttggtggtacagcttcaacagcaggccttgcaccagttctagaacaaaggtttgccactggagtcatttttcaaaagactataaatgtgctgctgtgtgtaacaattcatatgttttgttcagggttctcaatactattccatcaaatcaaccgatagagaaagcagaggtatgttctttcaaactaagaatgtgaacaagtttttaagtacaaatgcacactccaattcttgaaaataacttgcaagttctatgataggttcatttctgactaatatattctatgataggttcatttccatcacatggttgtcacagcatcttggtgtccaacgaggggccgctcgagagccatggtcaccaaagatgctgtgataaccatggcccatcatttctttgttattaatctcatctaatattgataggtattacagtcgaggagttatccattatttgtcccatggaaaggtggtgtggtaagttacatctatcttcagtctggtgttctcctatttcttgtaagacaaactaatgaaatcattacatattacatgataatttatattttcagtacattttccttattgttcaaatgcatttcattttaagggaacttttggaatgaacatgatcatatgttaatctcactatttgattatgtacttcatttccccttcctatagtcatatgatgctttatttattattcacaaaagtagtaactggtaatgtagtatcaatctagtagaaatacaaatatatctagcacttaattggaaaggatgttacacattggcaaactcaaatggagtgtcaatgtccccttaggtgggaaatagacaaatcttaactacatacttgtgtgcatcatgagccaaagaataaatccactgaaagaatattcagttgataacctggtacaaatcctgaacaagtgtttttcaggtgttaaggtgacataccccttgtttttgtgccacgtatcttaacatacttttgcttgcttatataagcatattggtgaaatcattggtgaagtttgacagattatggtaattgaagaaatccaaagcaagaaagcaatttacttaacataaaataatgtcatctaattggaaacttcagaataatagatttaaagaggctcactaaataggtggatccatctttaaattatttaagtgctttatattttgccagtttatgccacatgttcttaatgtaaaaagcatgcaaatgtgtgcagtgttgttttgctcctttttattttccccctttttgcgctcttatatttcaaattcataagccctaacttgtacagattttgggcgtacttgatattggtcgtgatgcttggatacatagagaagattgggctaaaaatggtgtccacatagggagtgggagaaaatatagggattcttattttcttcaggcacaggcaatgtgttactacaattcataacaggtatctctccaccctggtgagcgccatgtacttgtccctgtcgtcatttccatgctcagagcctcagttatgttatttcttggtcaattctgtagttataaacttataatctacatttgagctatcatgtaggaaattttaagtggaaattttagtctgcctttttaagggatagcatgattttgtttcacagttacatcatatatttctttataacaattggaggctctcctggaagcgaccacaaattttgaggccgaaaactagatatccccacattaatctgtaaaactaaaaatctatccatctatgacatctacaactgtatggtaaatgtactgattacaaatatacagtctttcctaacacatgaaccgatatacgactctagcatggtatcttggttagatttgattgttggaaccactaagttgttgagtcgattttgtagcatataaaggacactaaagaaattttagttaaaatatgcacgggttaaaggctaggctggtttttttttttaataaaacgcatgagagctgtgcttcatttcattaagaaggaaaaacaaatcacccatacaaccaagggctcgtgatcccttcccaaaacacatccgcaaatagtgccctttggttagtgacctacaaaggaaaacttggagcgcaagagctccagccaggcaccatagccttagcttctgttgacactgcctgcaacacctccatgatgtttggaattgatccgttgaaaacaaaagtcattacgctgtttccatatttcgcaagcaactagggtaatgaatgaagtcacccccttattttgctccttaggaacatccttgacagctttccacgactgtttagcaaaacgagttactgaaggttgaggggcagcaccggtcagcttcaagaaaatctaggtccaaacttgctgagagaagacgcatgagacaaggatgtgctcgatggtttcatcctcttgatcacatagtgggcaggttgtcaggtgcactagtccgtgtttggcaagacagtccgctagtatacagcttaaacgctaagctatataattcattttctaaacatggtatacagtgccaattttaaatcatttatcttaactaattaaaatattcttaattttcctttcgtcacctaattttcgtccgtatgcgcaatttttttcactcgtctgtgtgcgatcctctcccaaaattttggttcatcagtccgtgagattgagaccgcgtcgctcccgtccggtacgcgcatacaggagatcaaatccgatccgagccaagaagcatggaaacgagagaaactgaatcacaaaatcacaaatccaacaacaatgaatcaaaatcatcccaaaaaattaaatcacaagaattaaatcaccggggccactgcgtatccgaggccaagcatgccgctgccctcaggccgtcatggcttgtctgcgcgctgccgtgtgccacgaggagggtgcactcacagattcacagccgattcatcaaaattcaccgattcatcacagattcaatcacaaggaaggggaaaatcaaaaggaggaaaaaactgcaaaaaaaaatctcttaaaacattcatcacaaaaaggaaatcacaaggagggggatggaggagcgtgctcctcaccgccacccgcaaccacgctcgtcgccagggaagggggccgccacaacgaggaggacggggtggacctggtggccgaccggagcgcctcccccctccgatcgtcccaccatctccatcttcacctcccgctcagagctgctcccactgctcaccgacgccactgttcgctgctcgcaaaggacatgacgccaccgccgctcctgttgcctgttgctcgtggaggacgaggacaccgcacctgtttctcgccaacgccatcgctgctgttgctggcttgctgctcgccaaggccgaggacgccatcgctcctgcgtgttgtgagaagggagaaaggatagaagaaagaatggctgtggagtgtggatggtaggagataaggtagagagagaatagagaaggggtaagagagataagagtttttttttgacacgtggtagggaggagctgagataataaagcaggagttgtgttggtggatagacttgagataatttttgcttggctcctgttcttgttttctgtaccgattattttttacaaccggaatcaatgtttatctcatactcttatcagtccgttaacttgaattgcacatggggaagaaagaagagcgaggatagaagaaaatggaactgacatgtgagtcccacgtctggggtctgacggaaaactcgacggagtggcacaattctaatttccccaaattccagtggcatacagccgatatcatgaatagtagtgacatttatctaaaatgacatatttgtagtgacatattttaatcgcctctcgctcagactcagagagaagcacccgtagaagtagcggtaaaggaggtcgtcgcacatgggtgcggaatataggggaggcgactggagcgtcaaagaggctatcgccatcggatccacccgtgggaagccgtgggagggcgccgccaccgcctttgctcatggtgggggagggcgtcgctgttgctgtccgcggtggggtagggcgccgccaaatgggccgcacgtacctagcagaagccacaagtttgggccgggctaaaatcaatgttctctctctcagtaattttaagtttttttttattttcagaaatagtattagtaccattttaattgtttatgactacttattaatttaattctagctaaattgaaccaacgagaaatttggctagatgtttcttatgacatggatttattttccgatcaacgttgattataaatttgtatacatttcatttctgttcatgtttcttaattatttacgccaacagtgatataattcaagaattatttctgtttaactatgtaattagttgagacaacacaatgatgagatctcattatggtgattattgatagctacaagactagatcactagtaaatagctaggttgtgtcctgactgctgtgtgcagttgctcctcctgagatgggtcctcttgctcttttttgagcttgaatagatttgcttttactgactaaaatttccaaaccaatcttgagggcttcttttgaagccttctaattatttgcaaagatatgaccttcagaaattctcttgctgccactgtatttgtacaaaaccaatattaggtttataaaaatgcagaaattaacttcatgattttgtaggagatatttttgacaagtgctttttttagggatgacaagtttaaactgcgatatttttttataatatttttacaaccgaattcctaaccaatacaagatttacttatatttgttttttttcacaggtaatttttatgaagactgtcatgggatgtagggtgaattgagtgcacttcatggtggaaacctttggatatagcagaaggttcatcaagaagggacccggatgtactaacccttcagttagaagtagcattgcatgtagaacatctattttcacagtaatctactaaccctgtaactcgtattgtcgcatcaggatacacctccatgagatcgtgtagacatgctttgtgaggtcaggaaattgtatgctgtgcatgagttgcatccgttattcttgacatatcatttgttcctcttatgatttaatctgatggtggcatggtgcatgtttatcatttaa

SEQ ID NO: 16 - DNA, 6060 bp, Oryza sativa
  source 1..6060: mol_type = genomic DNA
cctctcaaagcaccgcgagctcgcgacgaggacgacgcagcgagacgagacgacaaaatttaccaaagtgcccctcaaacccctcaccccctccgcctccgcctccggcgagcccgtcgccgccggccggcatgccgtcggggtaccgcccggaccgggagaccgacttcgccggcttcccgagcaccacccccatcgtcatcgacaacggcgcctccaccttccgcatcgggtacgacctcccacccgccgccgcccggaaactccccccccccccaaaccctaaccctagcagggcttccgttccgtacgtggattctgtgaagtgacgtggtggtttggtgccgtgcaggtgggccggcgaggcggagccccgcgtcgccttccgcaacatcgtgcagcggccgcgccaccgcagctctggtacgccgcattgcgcgctttggaaagcttggctgtgatatctgtttggtgattggggtttttctttggatatactgcgagaagtttgatttctgcttcttccgttaatccttagcgtgcgttttcagaatgttcagtgaataggtatggcgtttcgttggtaattgggtgctgtttgtgtaatttgttttgttttgatgcacagaaattgggtgctgcattttaattatgtctatcagcagccacttattaggcccattttgaaactctactcaattcaagtgggagttgaactgttacttgtcagattccaatgggctttatttatttttatcgtttgcgatgttttgatacaacttgattcattttcttcgtaagtgatactagtaattctgaaaacagatcaagttcagatgttttagtgctctctttgtgtttgttcaattacactgtatggttcatgcttgtctgaatataccattactgaactgaacctcttatgggtatggcttgagtcaggctaataataacagagtttgacaaaatatgataattcaactgattggaattcgttttctgtgatgcaggtgaaactgtcacagttgttggggacactgatccagctttgatgaagtatttcgattgcacacgatcagcaattcgctcaccatttgatgatgatgttgtctaccagttcgagtacatggaatatgttagtttgcttagttattcctatgaaaccatcttaactttttttttgtttgagttggtagcaagatctatagatggtttgctatatgtttagcttgaactgatcagtctggtctgtcatctttgattctgaatgcaatcttaatgtgtgtgttaatttttaggctcaccagaataatgcatatgaaacattttaagaataagatacgtgtcttaactgtggttgagatgtatattaactgatattaagaaaagctttatctgaagttagaaattcatattctaacttgcttctatgagtatgctctattctatagctattaatgataatatctttcatagttcacatatcctttatgacattagataccaatacatattgttatgtttcacaaatttagagtgcagcacatgattgcttacttcagagtgttgatatttgcactccaacctttattgcttgtgtaacaaacattttttaagtatttctttgatctggtattattactgtctgggttgcagattcttgactttggttttgatcgactaggtgccacttcagaggtaaattgcactctgccatcatctgtactatgaatatattctgaatgtagttgacttatgtactgtttccttggtttgacagctttgctttaccttgcactagtaaatgtggggtagtccctctcaaataaaaatgatgaaatttgggggttcttttgtatgccagttctatgtataagtgaagtgtgtgcaatgattgggactatgtagtgtttattaaaacttgaatttagcatgtgagttctaaaatggtcagttggtttcgggttcagaattaagtttcttatgaatatattgcatagtgacacagttgacgttcacaagttgaacgtaatgcttcaaagtctttgggaaactttagtatcaggctctcagcctctaaaacaggcaagttaaatgacaagtgaatgtcatattcagcatatccatcctagacatatgacagacatggacaattatcttcatcagtgagctttctcctctcaagtgtatggtgggtgacagtgaaaaaataacccaggcatagcaggcatttctgaacagatttttctcattagtatcatatagttctaatagaaagtgttatgtgcctttggttatatagtaatatatttgtatgcatccttttaccttagaattttctggttcccacatgagctatttgtttggtttcatgctgctggaagtaacagtaatgctgggcaggtgggccatcccattcttatgacagagtgtgaatgcaatccatccttttctcgagccagaatgtcagaactactttttgagacatatggcgtgccatccattggtaatgatacttatctttttgtgccattgttatcaattgtgcatggtagttttgaagtaagaattgtcgatgctaaagatgtttcttcctatgtgagtttcagcttttggcattgacgatgtgtttagttacaagtacaatcagaaacttgggaattgtggagaagatggactggccatttcgtgtgaacatggaacatgccatgttgttccagtaagtttggtccttccacatgccttcctcttaactttgtgcaacatacaaatcctttgccattgcatttccattaccttgtcagatgttcggaaaattaatgcattgcatgcttgaagaacacagtattgttgaatgcattgtagattctaaaactctgattggataatctgtagtgggtaatgctatataacatgctcatggaaagagagagagagagaaagagtgcccctattcttagctaaatcattttgctcatggaagtcgggatgtattttcttgatctccagacacagcatgttgttttctttccatctaatctatgatgcttccggacaactacattggtaaaagttgctttgtattttgagccctgtgtgtttgaatttctgcttacttttccatggtaggctgcatactaactcatccaatccaagttagactattcttctctgtagtgtatttttcacaatttgtttattgttgtcatgatcctgaaacaatcaataaacaaaaatattatgttgtactcatcaaagtggttctgtgaaataaaatcttctttctttgtccacatatgcattctgattaatgctttgctgtgtatatgcattcagtttttaaagggagaacctgtgttgggggcatgctgcagaaccaacgttggtggctttcacatcacagattttctgaggcagctcctctctctaaagtatccctatcacaggtaggtgcccgcagcatatttctgaagtgctccatgcatttttttttcctaccatgtctaatcgttgccactttacattgagtagtgcaagcattacatgggaaaaggctgaagagctgaagaaggaacattgttacgtagctcttgattatatgtcagagttgcagatatttaaggtgagaaacttttatttaccgtttgttttcttaccaatgtaaattccaaatccagttcatctatagaatgcacagggcttttctaccgtgttacatttctagctctttctttcaacactatgaatttattgatccacttggcagaacaataaggaagaagctgaagaaaaaactaggtattggcagctaccatgggtcccgcctcctgtagaagaaccaccatctgaggaagaacttgcaagaaaagcagctttgaaggaaaaggctggtcaacgtttgcgagatatggctgctgcaaaaaggtcgcagaagatagcagaacttgaaaaacagctttcttatttggaggaactaatggagcaacttgatggagctgaggaagaagaagcaacagccattttaggtagatctgggtatctttcccagcaggaaatcaaatctgctattttgaaagcaacacaatccttaaggaaggcaaagggggagtccaatggtaacgaagagaaagcagatgcttctggggttgataagtatccacttgtgtctgtccctgatgaaacattgacaccagaacaggtgtgtgtctgtccatttatcatctgtagcaaaggggtttgtttttgcttgtgttttggggagaccttttgcgactgtgtgacatgagcacatatctattataccaagtttagatattttccatgtttcaaatatttactattcttatttcactttcgtatactttcagttaaaagagaagaagaaacagatactacttaaaaccacaacagaaggtcgaatgcgtgccaagcagagacgtgctgaggaggaagcattgagggagaagcaagaagaagagaggcgtttgtaagttgcgatgtccccagtctgaaatttatcattcatacggccgtcataattagtttatctgcattcagcttaagatcctcttttttgaaattttaagtacactgggttagttaaccagttatttcagagccatctttttagtttttgttcttgtgatacgcttcgtgctgatataagccctggaaatcaagcatgcattctgcaattccaaacaatgttcaatttactattctattatcctcatatcaatgaaatatacactctatgaaaagggataaatttttctcgaatctgtcataaatatttgccatgcgctctatacgctgcttttatgatatgttttactttaatatccagggagaacccagagttataccttgaagagctccgtgctcgatactcggaactttctgatagggttgatcagaggaagcgacagaaactcaatggtggtaagaccaatggtaatcataattcatctggtggagtaggccgtggggaacgtcttaatgccgcccagaaagaaaggatgcggttgctcacatctgctgcatttgatcgggggaagggcgaggacacttttggtacgagagatgaagattggttagtctacaaaaagatgagcaaagataatgacgacgacgacgatgggaacgatgatgatgaatcagaacttgctcgaattgcttctaagatccaggtaagatctcacgttcaagcaatcttgcttgtgagccgtgatggccattttgtcttacttagatctcacacctcaatagtttcttttacaatcataaactatttgatgcttccatgtgcaggatatggaccctacatttgtgaacaaagctgaagctgtccaacagactcctgagcctcctaaggtccggactcttacagcagaagattacaggatttccatagggatcgagcggttccggtgccctgaaatattgttccagcctggtatgataggaattgaccaggctggtatcgatgagatggtcagcatctcacttaggcgactaatggaagacgaggctgtcaaggagcgcctttgccagtccatccttgtcactggaggctgttctttgatcccaggcatgatccctcggctggaatccggaatccggcagtttcggccctacctctcacccctgaagcttgttagagcagccgacccccttatagatgcatggaggggcgctgctgcctttgcagcttccagcaagtttgggaggcacaccttcagcttagcagattacagagagcatggagaaaacttgtttcatcggtacaacattgtttactccttgtagtatctttggcagcatgggctaacatggatatgctgacacccaatgttgttacatatttatgaacaaagaacacaagtcaatttattgacaggcaatagcagtaaccatttttgaagcaactcggtgttcggcgtaattttactgtggcatttatggttttattatgtatattggcctgttagctttagaaccttttaatgtaagacaatggtagcttgcatattatacagagagggtcttgagtttcgtcaa

SEQ ID NO: 17 - DNA, 4978 bp, Oryza sativa
  source 1..4978: mol_type = genomic DNA
gccacgttggacccgcgcgggccactcacccgctccaaacttctggtcatcctcgtcctcgccttcctcctcctcctcctcgatcccaacccaattcccccgcggccgcatgtagagctagccccacccggcgagctctcccacctcctccatggcgatggcggtgctgctccgcaaggtgtggggctccgtgctggcccgcgcggcggcgggggcggcgccgccggaggccttcgccgccgccgcctccccgcgccgcccgcaggccgccggggagtacggctcgctgggcgcgctcgacgttctcccgatcgacgtgctcgcgcagatcctgcgcctgctcggccccgccgacgccgcgcggtccaccgccgtgtgccgcgcctggcgcctgctcgcctccgacaatggcctgtgggccttcttcctccgcctcggccccgatccgtgggagctcgtcgtcttcgccgagacccacctcggcgctggcccggccttgcaccccgggtccgtactccgtaccgcggcgcctctcccgctgtctcgcatactccagttgttagtacttatagtatctttacctaacaccatcgttgtgcgcttgtaggctgtactacgatagctcgccgcagctttcgttcaagcatgtttacacccgtcgagcggtggttcctggttcgattatagtcgatggtatgatcctcttcgacattcatattgtgaatctttgtgtatgctttaaaataaccattaaccgatgctttggttaataatagtagacactggatagtagagtgaccgagtacagtgcacattgattgcttcgtctgagttttcaattgcaaaagttcggtatttatacattacaacagctgtgtggtttgtggagtatatcggtattagatttgctcaatcatgtttagttggttgcaacagaagggggctgtgtattagttcttcccctttgaactcatgtatcctctggtgtttttcttattaaggtggatcgggatattgtaagtacggatggagcaagtatgctgctccatctgggcgttgtgcgacattcttggtaagctatcaagacccgctaccacatcttaatgacatattcccaactattttgtaccatcatgatgaccaaggctgatctatgaacatgagtattcgtgttaattgaatcaataagagagattgctcaattgctatttatgttgggatcaacatttaggaatttggcaacatcgagtcacctatgtatgcaaggcttcgtcacttcttgtccacaatctacaccaggttctaaaacttcaacagtacaacttgcttatttcgtctgattaatcttgccttagctaccacatatttgtccagaatggatcttttatgttcctgaaaggattttcttttgtgtcggtattggattaattcaattcgattgtaccatgaaaacttgacttctacaggatgcaagtaaagccttctactcaaccaattattgttgttcttccactctgccactcggatggttagtgtgtagtattttcagttgggtcaattttctagatggcagttctgtatttgaaaatagtatattgcaagagaaatttatggtcaaattaattttgtaagaccataccaagtcaatttgctccttataaaaatgaagggaggagggtattcgtgttgcacatcccatcaactctcttgttattcctgtttcactaaactaatcccaacttcttttgctgcaagtcaccaagtctaattcaaaatttacacagatactgagtctgctagggcttcaagaaagcaatacagggacacattatactcggttctgttcgatatgaatgttcctgctgtttgttctgttgatcaggtgtgcattcttatatttattttcttttgatgtttgctcagtgatatgcatccatgttgcacaccatgatatcctttgcagttcattagatgcttattcatcatcatcattttaatgaactttgttggggagtcaagatttgaagaaattttcttctttgggtttagcttttagaaaattgaactgttggtttaattgccttgcaccatcacgagttttagcccaagttgaagatttttcaattgattgcttcgcatggagtatatatttggtcttgtgtcctcaagctaaacacatctctcgaattgtagttgaagtacaccattctcaggctaatatccttttatgttcatactcccatgtatactcacactgcattaattttctgtctctgttttgatgataatatcttttaacttattgccatttgcctgcaggcagttctagctttatatgctgctaaacgaacttctggtattgttgtcaacattggatttaatgccacatctattgttcctagtaagtacttaacatcagtttaattcatgaatccttccatgattcagttgattgcacttatgttcatttactgagattatctctaaaaattgggaaattccattgcgtcttttacaatcttacatgcttcaaattgtctttagaaagtaatgagaagatttttttttaatgtcaatagactaccttagcttatataaaagctaagcatggatatcttgccgaatattttcaatgtgaatgtatcagcatagtgttacaaaataccaaaatactcactgtttccattcttatacatgttctttcaacagtatttcaaggtagggtaatgcatgagataggtgttgaaactgtggggcaaggtgccctcaaacttactggatttctgaaggaactaatgcagcagagaaatataacatttgagtcactgtacactgttcgaaccatcaaagaggtaaaatcttatttatgccaagacagctaatgttatttggatggatttgacctaatagctacagtccaactaattgtgcctgggggcctattagtcggggctaacctgaatttcacgtgacagttgacacacttttcctctatgtcattgtaaagaaactttgttacgtcgcggctgattatgaagcagaaaaacgtaaagatacacaagcttcctgtgaagtagatggtgaaggatggtttactctgtctgaagaaaggttcaagactgcagaaatccttttccagccccagattggaggagtgtatgtctcttatctgtcatatttcctattatgtgattttatatggttcaattatggttgctcactgctgaccttgcaggcgtgctatgggcttgcataaagcagtatctctgtgtatggatcactgctacaattcagaagtgttcggtgatgacaactggtacaagacagtagttttatccggtggatcttcatgcttacctggtttatcaggtatgctaccttgtgcctttttaattctgactatatcagaaataattgatatgaaaataaactggaaaactgatgcaagttttctatcttgtgaatgatgtcatctctgtacattacagagagactggaaaaggagctccgtgaacttcttccagcacatatttcagaagggataagggttattcctcccccatttggcaccgattctgcctggtttggtgcaaaaatgattagcaacgtaaggacagcatctcccaccttgatcattgattcttatcatcaattttttgccacttaagttttactagttgctgacttgatcaaattttaggtgagcactttcacggaggcatggtgcatcaagaagaagcagtttcgccagaagactcgtcgcaatggtccatcttttgtgaatgtgtggtaatagagccatataattgcaatacgattgcacgggaagagtccgtgatgaggggaaataaacatggggctgtctgttagcttttctccatatccagagtacggtacatagcaatatagcctagtcccaggtgtatagaacaaaagtgaagtccacattgtgtagaaatggactacaggtgaatacataatatactattgtttttattataggatgttgtagaaggaaatgctccaacacgatgtacggacgtgaattttgttgtcgattggcaaaagagacctgctgttgtttgttgtgaaagtatatcttatatatatggttgagaaatgtgtaacttatggtccctgtcataaaaataaatttggatattgcacaacaggttttcttttgataaattgcacaacagttttggagcaacaggcgttagtctcgagcatggtaaggccaataccgatacaagcgagtttcaaccatatgaaactagatgcacaaagtaaactataaaactggttaaaactagcattggaagacttgagtgtttcagttcatctaactatattcaattccatccgttgtcacaagcaacctatgagaccacgaaataaaattacacattgaagatcttattttattgactgacttcaaatctctttgacatacactcttgatagaactctccatcctaatgctagaaggcaacatcgcctccgatagcccatctgtacccatacacattaattctcaggcgtcggccatgctgtgcttgtacctttcctctttaacgtataatgacgtaatgtaacccctttttatagcctggtcttagcaacgatcattatgataaggtgactgcacttaagaaacgtgtaagctgaacctaaagtacattcagcaacacgcaaaatcttcatccgtgccgtgttgatcacatataaatcatagctatggcaccgacaaagcacgaataataaatatgatttaggaaacgacttaaataacagaacagtcaggtagaacagactaccagactgaaacggacttcacaaggtagggtacatatgagttcaactgggcacaacagccctcaaaagtccattcatacttcgttggggggagagtggtgacttgatggttatttaggtgataacgtcgttgggtttcgacacgtccaccagtttggctggc

SEQ ID NO: 18 - DNA, 2869 bp, Glycine max
  source 1..2869: mol_type = genomic DNA
caaatgcattacattacactctctcactctcacaccaaccacacactctctctctctctccgcatatatatacccctcttcttcattctcctctttctctgttctcatttctctttctgtagccctcaatcaccggagagagagtgagtgcaaagccatcgtcttcttctcagacaaggtattcatcttaatcgcttgcatcatagctttgatgcaaagtacgtttccttttgctctttgattcagcgctttttttttttttttttgcaatctcgcatgtttattcttagatttgttcaacagtactactctttattttttaatctgtgtgacattgctacctacctcatcaaaatcatatctggatgtttttgtatctgattatttatattcgtactgcctgatctatactgaatgagatgtagtggattgtggcgatttgtagttttagtgatgcggatggcatatcatagttccgatcttctagacctgagatcttcgatctttttaaactgtacttttacttatttattttaaaatggggatagacatcgaatctataatcttgtgttggatggctttatggtctgatctgttttttatgtgggaatctctcactttttcttttttatttatcattgatctttctttgttgaagatcatctagtgtttgggaacttaagatatcctgatgaatgttgagattttagtagatatcctagtaagtttgagattactagctgcacatactcccttcctatgtttattttattcgccattttctggacgttttccattcatttataaattttggcagttttactttaaaaaaatgatcaggatcggctcctttgtttgtcaatttatgtaccttttctttctaagcaatcataaagtagattatataatactgaattatttcatttgcttgctttcttcccattgatttttgtgtgttatatacaatgtactgttgctgtctcatatagaaaataaacgtaatcttcaaagtctgtaagtggctgggttctgcagattgtctattcaaacttgttaatactggcaatttgttctatgcatacagtagtttggtaaaagatggctgatgctgaggatattcaaccccttgtctgtgacaatggaactggaatggtgaaggttagtactttgcagtttcttctgttatgtgtaattgcatctattagtctcggtttcgttatcaaacgatttatttctataatgatctgtgtacaggcaggatttgctggtgatgatgctcctagggctgtgtttcccagtattgttggccgacctcgtcatactggtgttatggttgggatgggtcaaaaggatgcctatgtaggtgatgaagcccagtcaaaaagaggtattcttactttgaagtacccaattgagcatggtatagttagtaactgggatgacatggaaaagatctggcatcacacattttacaatgaattgcgtgttgctcctgaggagcacccagtgcttctgactgaggctccactcaacccaaaggccaacagagaaaaaatgacccaaatcatgtttgagaccttcaatgtgcctgccatgtatgtggccatccaagctgtcctctccctatatgcaagtggtcgcacaactggtttgtatttgtatccatctgtttcaattcatagttttgtcatcacattgttctttccctgaatcaaatactttctgaaacaggtattgttttggactctggcgatggtgttagtcacactgtgccaatctatgagggctatgcactccctcatgccattcttcgtttggatcttgctggccgtgatctgactgactctttgatgaagatcctcactgagagagggtacatgttcaccacctctgccgagcgggaaattgttcgtgacatgaaggagaagcttgcttatgttgccttggattatgagcaagaacttgagactgcaaagagcagttcttcagttgagaaaaactacgagcttcctgatgggcaagttatcaccattggagctgagagattccgttgccctgaagttcttttccagccttctatgattggaatggaagctgctggaattcacgagaccacctacaactccatcatgaagtgtgatgtggatattaggaaggatctgtatggtaacattgttcttagtggtggctcaactatgttccctggtattgctgaccgtatgagcaaagaaatcactgcacttgctcctagcagcatgaagattaaggttgtggctccaccagagagaaagtatagtgtttggattggaggatcaatccttgcatccctcagcaccttccagcaggtgattgttttgtttattgcaaattatctcttccacacgtgtaccaattagattgaactaaacatgttttggttttgcagatgtggatatcgaagggtgaatatgatgagtctggtccatccattgtccacaggaagtgcttctaagtccaaaagaaatgctttaatggtgagttatgtttttgctatggcttttttggtgtctgtgtcatgtcgtgcgaactatgttgtcatggataagaggtgggataggattggagggtatattcggagagcttgatgtatcatatattgtgtggcatccctctggatgtggcgggcacagaattgttgagaagcatttttcatcttggaattcatctgtcttcgtaagtaggtttgtctgtagcaaaggagtggtgatgcttattttctttttgtaccctttttcagagttcacatttttttggcctttggaacattaatgtgaatgtctatagctacatgtatcgagaatttttatataagattgtcagttcgcactca

SEQ ID NO: 19 - DNA, 19368 bp, Glycine max
  source 1..19368: mol_type = genomic DNA
acgtgggtataacggtgaaaccctcgtgaattctttttgtgggcttatccaagtaacctagcccttaccttaccctaattttctttcttcaaatctcgcgcgctcctcacttcgagtgttcgactttcctcctccgaccacctcgccgggaattcccgcggcggcgctccttgtctccgcagcttctctctctactgaagccctagagagagaaaatcataaaccctaattcccctgtcaagctcgtagcacagtcacagccatgtatggcggtggtgagtatcaaaaccaattctccttctatttcttctgcttctgagatgtgagctcaattttctccctttggttgaatccacagatgaagtatcagctatagtaattgacttgggttcacacacttgtaaagctggttatgccggtgaagatgctcccaaggctgtgtttccctctgtaagtgttttctctactctttttacctttctaaagttttggatttgttgttgtgtttattgtttttctgatattgttttactatttatggggctatagagtaagaaatgttgttatgctctcagttaatggtaaagaagacactggcattttgctgtggtgataggctagtactgcttgatagtgtaattaggtgcttgtataaattttagttgattagaataatatctggagaaaatgtatgggtagtttgattgttgataatgaattggtggttgttttggcatatgcgaacttaggttgttggagcaattgatcaaatggatgttgatgaagcagataatggtgaaaagaaccctggctctgctccggaatcaaataataataatgttagaaatgctgattctgacaaggccaagggaaagaggaaattgtatgtaggatcccagtccttggggtaccgcagagaccatatggaggtaactcttttgtaagggttttcgtgattggacttggagtagtaatttacagatttttttgaaaataatgaataggtgtttctattttcttcttctgtgctgtcaggtgctgtctccatttaaggatggagttgttgctgactgggatattgttgacagcatatgggatcatgccttcaggtcaatattgaattcctaatctgtctgttatatgtattgtaggattgttgttttccttttaccgtttgtttattttatgtcatatggttggcatttgataaagttcacgtggttccttttttgattaaaatcccttgatgattgatgattcttctcgaaagcaatggtccaaagaatagttgacctgttacctgtatctaaaactcagatacatgagaaattctggtattaatggtggctaattaatgcttgatgttaatgaacacacttttccaaacatccatggtccataccataaacatatctttacttttactttggcttttcaaggcctctctcaaccctgctctttcaagtaaggattcgagccgttgcttgaacacatggattgttagcaagtgtccagtagcaacattttggaggtgaaaattggggatcacatcataccaacgttgcagtgttgcacattttaggtattttggatctgtcttacaaaataatgtgggagattgagaggtatgaatgcatatggatttttttttttctcagcaaaaatagatatatattaaagtgaaatagtaccagaggtactagagatacaactattgaagtgagtatgtagctggttgcggtgaatacacaggcccaagctattacccctgtagctattacatgattataaaccacccctcccctgaatgcatatggattaaactgagtgaaccaaacacatagatacacattcgactgtatctataaaaaaaaagatacacatttgagcttataagaaaattctactaaatagctataagatcaatgatgctttgtatggtagtgaatgctggataacaaagtgcaaaagagaattaataggtatatcagagatgataatgtcaaggtggacgagtggatatgcaaagaaaggaaagataagatcaagaatataggaaagagttggagtagcaccactaaggagaagataacaaaaactcacttagagtggtttgtcatgtgagaagatcaacaacggctccagcaagaaaactggatcaaattgaagatagtgcaatgaaagggtagaggagccaataaaaataccttacactaaatggatttgttgaaattttttttgatatatctctctattttttatccatgtaactaatcctacctagtggaataagtgtatgtttggatggaattattttgaagatcataatctgattgatagaaaaaaagctgtttgtgttactaagcctgtatgttgaataactatcttagtgaattgtcactaaccaactaagtatcttagtgaactaagtcactaagacttaactacccgagactgcagttgaataactgcagctctcttacaatactccaataagcctgtatgttagtggtggtggttcttttcctattctggttttgaccatttttcaatttttaattttttttaactcatataccttgagaattattttatttgtcactgggcacacattatttttttttggtagggaatgcctattgattattgggcatgctttcttgtttttttttttttttttggtagggagtgcctattgattgatcctaaagagcatcctatgctccttgcagagccctcttctaactctcaacaacagagagaaaggtattcttgttataatttgtagtctataactaatagagttcagtttaaagcatcagtatgcatgatttgctttttttattttttattttatttttgcaggacagtggagcatatgtttgagaagtacaaagcacctgcattatttttggcaaaaaatgctgttagtccttcactgacctatacctctaaaaataatatatgttatggagtgagaataaaactattgaaagtttattccttgtgctgagatacaggttctgacttcttttgcatcagggcgtgctacgtctgtagttgttgatgggtaagagatcatgaggttactgaatggtagttttgttcttattctacggtagtatcaatataacaatgatattttttcttcatttctttattggtgtatatctattgcttacctcgtaagatattatatatggaagacctaagttgtattgtcttcttcctcttcaacccctgcccccttacactgtcctcaaagtagtagtcatatactcataaaaagccttgtagatggcattagactttgctttagtaaaaggataaggaagttttaagcatgagattgagaattcaattgagaaaattgaaaagggtagggagaaatagtacaacttttaaagttcaatatttgttctatatttattactactaatatgtcccgataatatgccagaagcattgctgatgttttcttcattattccattgttttcagtggtggaggctcaactacagttgcaccggtacatgatggttatgttcttcaaaaggtattccttattaacgtatcaaataaaattcacttgttgttcatgtaatgaaattgatccatattttgattgaaatttcaatatagttttgttatccaatttaatatatttggttttactgcagttgataggaccatgcattgatctgatttcttgtatgcacctctctgatgatagataaacttgaaatggtgtgatgatttgattaactatgggaaatatatacattaattattaaaaatttaattgtatgaaaggacatcttgaaaaataacttggtgttaaagtcttccgtttatgtaattgctattttgtctttgtaataaatagatttttggttatgcaattgtatataggccatcatctatatatttttattcattcattaaattgtgttttactaaaatacatctaataattcaaaattgtatgagtggctatgtatattttaggcactactgcttggctaggtatttacaaactaatatttcatcatgtatgctctgcattttcataatgtctgccattccattttctatatatgtgcatgccgcatacatgcacacacatgtcaaattaataatttaagatctcattgtactcagcatttatattagagatttgactaatagtatgggtctttctgtctgctcatatcttctactatgtttacaacacaaggctgtggcaacctctccaattggaggagaatttcttacagactgcttgatgaaaagtttggaaagcaagggtattatggtgggtgacaaacattagctattttatttttcaataatcatctgaagcaaaggtgctgtgattttatgtgcctgagatttccccccttttacttgtcacagataaaacctcggtattccttcaggagaaaggaaatacgccctggagagtttcaggtataatttgttttcattttaatgatctgtgactagtatttttatttccattttcttgcaatcattaaagtgtgaggaatcatacttgttttttttttcctgttgttttctttaaaatttgaacttgggctggttgaggttccatcccatgtgtatatgtactgtctgtgcctccagaacttcttcatttgtctcatctcttttaattgagtgtccttcttgaattgttttcagttatggatcaaattcgataaaatttgcatgtgccattatactgctgctagtgacatgagctgaacaatttagctcgtgtttattctactagaatgacataagttgtaaaagagttctaacagatcatagaagtgagatattttgagagaaaagtttagaatgaagaagtgaaaaatgagtattagcctctgaactgagttacaactcagtatttatagatctgagtgattagttatgaccaactaattcaccaactaacttactaacactcataacagaaaactaactcctaactaactggcttaattgagagtgtagttgaacactgcaactctttgtacaatactctaataccccccttcaaggtggatgagactttgaaggagtctcaagcacattgagtttggtccttagaaataaaaatctggttggagagaggggcttggtgagagcatctgcccactgatcaagagccagaatatgatgaacaaccagctgcttggacaagactttttctctaacaaagaagatgtcaatgtccatgtgcttggtccgagcatgaagaacaggattattggctatagcaactgctctctgattatgacagaagataatgggagtgatgaaaggaacttgtggctcagttaaaagggtctgaatccaagataattcagcagtagtttgagccaaactttgatattctgcctctgtactggaccttgcaacaacttgcttcttttgggaccaccaagaaatgagattaggaccaaagtagatggctgaaccagacgtggatcttctgtcttcactatcagaagcccaatcagcatcacagagagcacgaagaggataaggtttccccagagcagcaggtctaaggtgtaatccatgcaacattgtacctttcaagtatcttaggattctttttactgcagtccaaggagggtctaaaggattggccataaactgacaaactcttttaactgagtagctgatctcaggtctagtaatagttgagtactgtagggcaccctctacagatctatatagagtaggatcagaaaagaggtctgaacctgttttagtaagtttgcagctggaagcaataggggaggaaataggttgagcttctgacatagaagttttctgcaacaaatctctgatgtatttcctttgagtgagaagtaatgatctgtcacgaagagtcttaacctcaatccccaaaaaatagtctagcagaccaagttgtttgagagaaaactttgaattaagttgtgaagtcagatggtgaaccaagttagtgggactgccagttattataatatcatccacataaaccaaaagatacagtgtgagagtgttagggtattgaatatccctaacagcagagaaaacaagagaaacagaaaatagaagaatatacagaaaatactgggggcaaactgaatttattcaagaaggaaaccttcttccaaggaaaaccctttacaatttctaattcttctctaccccttcctctaatgagaatactcttatttataatatcctaatccaactaattgataaagatagaataataaagattagatgatagaataataaagataaagatagaataataaagatagatggccctaaagattaaactaataactaattcgatcctatctcccgtgtaggggctttcttccttctagaatagaccctccagataactggtctatcttgagatctaacaatactcccctccaaagaatgaaccttgtcctcaaggttaaattcaggaaatagattctgaatcacatccacattctcccacacagatttacttaaaactgaagtagctaaccctttgctgaaatatgcaactggacgtttcccttgtgttaacacagctccgatccctgttccgcaagcatcacattcaatggaaaaaggttccttaaagtttggtaaagtcaaaactggagagtgggttaatgcgtccttaagtgcattaaaggactcagttgccgctgcactccaattaaaagctcctttcttcaacaaatcactgagtggtttagcaatcttcccataatctttcacaaatttcctgtagtaaccagttaagcccaaaaatcccctcaaagctttaatggattttggtataggccaatgaaggactgcatctactttttttggatccatagagactccctctctcgaaatcagatgccctaaataatcgatggtggtcctgcccaaactgcatttcttgctgtttgcaaagaaattatgatgaaagagagtgtgtaggacctcactcaagtgctgtagatggctctcccaatcgctgctatatactaagatgtcatcaaagaagaccaacacaaatttccgtagaaagggctgcaacacagaattcatagctcgttggagagtggtaggggcgttggtgaggccaaaaggcatcacaagggactcataatgaccttgatgagtccgaaaggctgttttgggaacgtcttcttcactcattcgaatttggtgatagcccgacttcaaattgattttggaaaagtatgcagccccaaatagttcgtccagtaattcttcgatcacaggaatgggaaacttgtccggaattgtcgctttattcagtgctctatagtcaatacaaaaccgccaactgccatctttcttttttgctaaaattaccgggctagaatacgggctattgctgggccggattatgccttcctgtaacatttctgcaacctgtttctcgatctcattcttctgtaagtgtggatatcgataaggacagacatttataggacccgtcccatcttggaggacaatcttgtgatctacaagtctgtttggaggtaagcctatgggtttggaaaaaatcgcttgaaaacgctctgtcacatgttgtaattgggtcaactgaagatggtcaagtttttgctcctcaccttgagttgctccctcttgatctcggagcaggtctgaatagaaaagtatcatggcagcagcctcaacatctgaagccctcccaaagaccttcgctgaaaatcccttcttctgcatgctatagtctcccgtgatttgggtgggtgacccttgatagcgaaaagacatggtaagagtcttccaattgtgttgtacctcacctaatgaagccaaccaggtcatcccgaggatgacatccacaccaccaagatcaaacaagaaaaagtctccagtgtaaacataaccctgcatctttaggatcagattctgacaatatccctgagattcctgtcggtgtccatttcccagctgaaccccaaaacttctagtaggttgaatcggccagttcatccttgagattaggtcccttgctacaaagttgtgactagcgccgctatcaatcagaatggtaaccccaacaccagccatttctccccatagtttcatggtttttggaggcgtaatgttcctctggaccagttgagataattccatccattggcagtggtattgatcccccactacatcattggtctcctctggttcctgtttgtcattctcttctatgttgtcgccttcgtcctccccaaggatagtgatccgcagactcccttctggacacttatgtccaaaaccaaaggctaaaccacatctaaaacagcggccctcctcttttcgttttaaaaattcagcgtatggcaattgtctagctcccttgtttcttgaaaaggtgccaacactgccgaaatgcgggttatttgatccacacgaagaaaccccttttggagctgtcatgatgttccgtgctccagtagtagctgggcgtgcctgggatacgctataattgcctgctgtattggctgctgaactcgctgggttgctaatcacgacgcttcccttatgttgaaaacgcggaggaaaaaaaaccctttgagaaggaggctgaccacgagcaaggcggagttcttcatccacatctcttgcaatttccatggcacgcaagacctctgtcggccggaaagatcgcaccctacatcgaatctccggctggagaccgcccaagaagtatcccagcatctgttcttctgatggatcagggatttgagccaccaaaatttcgaattctctcaaataaacgtccacggactcctcctgtttgagagtttttaaacgctcgaaaacattgcccttactaccttcaccaaaacgctgaagcatgagtggggttaaagattgccaagaaagagatggattgcgttttcgaatgaaacgataccagtgtaccgcctccccttccatgctaatgaatgccaatcgaatcttctcttcttctttcacttgatgtacttcgaaaaaaatttcagctctagctatccaagacagaggatctgttccatcgaagaccggtagttccaccttcttggtccaaaagcgtggttcaaaaaccacctcagattcggtattgctctccgacttggtatcggaggggtctttctgtagtcgttccagctgctgcagtacgtgattcatgatgccttctaccctctggatgccgcctctgagatcagctatgtcttctccatgggtcatcaaggtgcggtctaaggtgtctatacgtgaatccatctggaatggtagaggaaagagcaggtcggaccaattgttagggtattgaatatccctaacagcagagaaaacaagagaaacagaaaatagaagaatatacggaaaatactgggggcaaactaaatttattcaagaaggaaaccttcttccaagggaaaaccctttacaatttcttattcttctctaccccttcctctaatgagaatactcttatttataatatcctaatccaactaattgataaagatagaataataaagataaagatagaataataaagattagatgatagaataataaagataaagatagaataataaagatagatggccctaaagattaaactaataactaatttgatcctatctcccgtgtaggggctttcttccttctagaatagaccctccagataactggtctatcttgagatctaacagagaggaagtcttgtaaacaaatagagatggatcacatttactagcaacaaatccaaactgaataaaagcagactgcaggctctcaaaccacggtcttggggcttgcttgagcccatacaaggctttatttagtttgcagatcagagaaggattggattgttggaaaccaggaggttgagtcatatagacagtctcattaagcaagccattaagaaagccattgttgacatctattagagtgtacatatgtacaactgttaaaacagtttagtaagagctgttagcttttgctaacagcacctccgtcttagctattaacagctgcactctctaagttcagagtcctataaatatctctttgtaactaactctgtgactaacttttgtgatactcaataatatgagattctctctttctgttacacaaaatttctctcaatttatcttagaacatctagctgagtcagcatccattaatttgtgattgctatagttaaagtaagcctaatagtgacaggtttcacaactggagaaaaggtttctgaaaaatcaaaaccttgtacttgattataacctttggcaaccagtcttgctttaaatatgttaatagagccatctgcattttccttgaccctaaaaacccattacaaccaatagcattcctgtttgatggaagaggtactagatctcaagtgtgattctttattaaagtttcatattccaattgcatggttgaatgccaattctccaaagagtggatttgcaaaccttgaccattgtctatgaatatctgattaggaccttcaaaaggctctagttgctgaatgttttgagattcaccagtaacatagaatgaagcaccagaatctagaatccaattggtagaattggattgaggttgagtgtttgtgaatagcactatgattggactgaggattgttactgacagatttgtaattggtattagtccaaacattagcaggtctagtatcaccagagttttggccagaactgttactattttgtgaataactggtgtagttatttgaagtttgagtggaagtggtctgagaataacttggactgagaggatcatgaagaacaaaggacaggtttggttgataatactgatcatagcggtaattgcaaacagaagcagtgtgaccaaatttgaaacacacctgactctggaagttggcaaaatgaccactgctgcggccgtgaccagcaccaccaccacggcagtgagaactaccactaccacggccagatccaccacaaaaagcgggaaaactcttcggatttgtcttgtttggcagagaaaaaccatcggagctgatcgcagaagacatatgatgtgcttgtgaataattgatgaaaggtgaatcagactgaaactgtttgctgaatttgttgagacgcgctttgtgagcaagaagagcttcaacttgctctatcggaagcggttcaaacttgttccagttcaacatggaatattacttcctatttcagcctcaatcctgatctatctcctcttgtttcagcctctacaccttcactttccccaataccttcctccaattccacttccagtcattctcaatcatccaatataatgtcgtctagtgaatctatacccactgcaccctctcccactcatcctcaatcatcaaatactatgtctcataatgaatctgtgtctgcatcaactcccattcccatcaacactcaccctatgcaaactaggtctaaatctggaatacacaatcctaggctgcatccttcattatttcttactcattctgaacctaaaagtgtaaagcaggccttggaaagttcagagtggtttgcaactatgcaggaggagtataatgctctaatgagaaacaaaacttgggattagttccattaccagctggtagacaagctattggatgcaagtgggtctttagaataaaagaaaatgctgacggttcaatcaataggtacaaagctagactagttgctaagggatttcatcaagttcatggctttgactttcatgaaatattttatcctgttgtaaaaccagttacaattagagtatttctaactcttgctctctcacaaggctgggacttatttcagcttgatgtcaacaatgcctttctaaatggattacttgaggagactgtctatatgactcaacctgcaggttttgaagttgaagaaaaatccttggtttgtaaacttaacaaggctctctatggattaaagcaagctccaaggcagtggcttgacagtaatacagattgggtttgtaggaagcaagtgtgatccctctttgttcatttatacacatcaacaacacactgtctacattctagtttatgtagatgatatcatcatcacaggaagttctaattctctcattcaacagttaacctcgagattgaatatagtcttctctctcaaacagctaggtcacttggactatttcttgggactggagattaagtatccccctaacaggtctattttgatgtctcaaagcaagtatgtcagagatctacttcataaaactcaaatggctgaggcacactctatctctactcctatggttacaaactgcaaactgtccaaacatggagctgatctatttcatgatccaactctctataggtcagtagtgggtgccctacagtatgccacccttactagacctgagattagttatgctgttaataaggtttgtcagtatatggctaatccattggattctcattgggctgtggtcaaaaggatattaagatatctcaagggtactatatttcatggtttattccttcaacctacttttgtttcaaaacctatggctctctatgctttctgtgatgctgattgggcatcagatattgatgacagacattccacgtcaggagcagctatctttcttggctcaaacttgatatcctggtggtccaggaagcaaaaagtcacggcaaggtccagcactgaagctgaaaatcgaagcttggctcaaacatctactgaattaacctggattcgaactcttctaacagaattacatgtttcttttcaaactcctgtgatttactgtgataatcaaagtgcagtgtccatagctcacaatccagtgttccatagtagaacaaaacatatggaaattggtgtcttttttgtaagagaacaagttttggccaaacaactctcagttgtgcatcttcctgccttagatcaatgggcagctgtcttaaccaagccactttcctcaataagatttgaagcactaagggacaaactcgatgtgaagcatttttctgtagaaaaaccttccccttgagtttgtggggggtattagaatgaatgtataaaaataactgattacaaacagttattgcaggacagttagacagctaactacttttctttcactaacagaattctgttaattagttgttagttagtttgtgattagtttcaagggctagaggtttataaatacctcctttgtaactgcattaaatgttaactttttcagaatcaataatatcagtttttcttttttttctgttctctctgttctctaattctgatacaactcagtatttatagatctgagtgattagttatgactaactaactcaccaactaacttactaactgactcataatagaaaacgaactcctaactaactgacttgattgagagtgcagttgaatactgcaagtctctgtacaatactctaataagctgaataatttacgtcgtgtttgttctacttgaattatgatatgtactaaatgcttgtgcaagttagcaaattaattttaaacttaaggtatcaaagagagaatggtattaacgtgttaggtatataattcaggatctgaaaaaacgaagatagagtgaggtgtagttatcttactttttttcagttacatatataaccttgcatccgttgttactttatttaacatttaaaataacttttagaatcttgggggcaaatgatagtgagccaaagtttagtttcttcatgtacctttctgtatgattttggttgtaactgcaattctacacataaatgattattatttctcattatcattttttttcttctgaatcctacagacagttgatcttgaatttcccaatactactgaaagctacaaactcttttcccaggtttgtgaatgaccatgcaatatctcaatttgttgcatttcatttatctgatgactgttcttcatgacagagggtgattgctagtgatatcaaggaatgtgtgtgccgtgctccagatactccatatgatggtttgtttacctcctgttgtcacctcctataatgttttgaatcttactggtcttgtgcttttgtttgaatcttattgttcaagtcctagtttttatagtggcatacttttatttctgttgtcctccgttctctctgtatacttcttagataactagatatgtgacccgtcttgtgatgtgatttactaaacttgatctctgtgctttcactcaggtcataaatgatgtttttcaatcatctggtttagtgataaacttgtacaagtcttcagttagctctttatagctctagaagatgttttaccttctcggttccaataaaattgcagtttctctatattaaatttatttttttcccctttatttgacagagagtgcgtattcaaacattccaatgacctcatatgagcttcctgatggccagtaagttgatgttattcttgttcattgaaacagggaggaggatggaatgaataatgtttcatcttcaaaatatcttctttcatttcatctgctactatatgcacttcatagcctaattgtagcttctggtttttctgtaatttatatttatatatttattgtctgttgttttatgatgtgtttgtttttattatgcaggacagttgaaattggagctgacagatttaagataccagatgttcttttcaatccatccctggttcaggtgtgggacttgcattcaaagatgtgattagtttatcttgttcatttaatataaaagatttttgatattgcatgttcttagaaatacaccaaggcttcttgcaagagtaaaaggaaaaaggtgcccttaatgtactagtagggacttgtagtgccttgattgaggtgaggtctcaagagacatatgcctcattgaagattggtgttaataaacagacaaaccaaattcttggtgttccacccttttataccgtgaaagaagaaaaaacaatacaaattttatcattcaagatgtttctggtaaaaaattataaattttagtgatgttaattataaatataaaaactgttaaaaagcatgcaggttgtgatatgaaaaaaagtataaaggatatagatatatagaataaaaaccaaataaagctattgaagtgttttcagtgacaacatttgttggcaagtggatgtcctgatacaaaacacaccatgcagcaagtaaacagaaaacggcccagctagaaaataaaaataaagctgacaagtataattgcaaaatgtggcatggaatcgaaaattgaaaacaaatataggagtaaagcaaataaaccagacagatggagtgctggtgcttagatggtgtatacaataggaattattaaaagtgccaaatcttctaaagaaaacttattcagtggtgcttagatggtgtttacaataggaattattcagtggtgcaaacttaataaattcaatagtattaaattatcaccaaaagtgccaaatcttctaaaagagtagaagaacaaatgaaaaatgaaggcagttgtttgatttgactggcttatatatttcaccgtcatgttgcatgacttcaacaattgttgtatttagaaaaagctcctctaaagaaaatttttcgtttaagtgcacaaggatgcattcacctttagattttagtgggtaaggcaatgatgtaatctaaaattaaaagtagatacactctcactttataggagtcttttttctgaaagctgtcaatttttatggactggggtttgtcaattccactgctcattactagtcaggttcttgtatggaaccccttttcaaaagcaccatgaaggtgtgaaaagtgtacacaccacaaagagcaaaaagcactggattcttaccctgccttgtctgtggtgcccttttaggctttaactccactgggcaatccaagattatagggattatatagttgatatgtattgctatcaggttgagtttggtttagaaaaaggatcttggttgtcaaattgggatttgaattgtatgaaaggcatatttttcaaattgttgatctaaatatatggcaagtaataagattattgatcaatacttgaaacatcataatttttttcccacataataaaaaagtcaaataagtcagtatataactataatctgcaatataaacattaaagtaaatcatgattcaagtcataataagttaaatataataggacattggttgagaaaacaatattcctgttagaacatatagggcattacttgtttattacagcacatccaacttctggctggtccatctttttttgtgcttctattttattctgtagttctttaaattacttgagagacaaaatttcatttgttctatttctgtgtactaattttcttatttgtgtcaatgataattacagtcaattcctggcatggagagctttgcagaaattgctccttcagttcgtggcctgccccaaatggtaatttaatttgatgtgaatctgttttaggcatctgacttgctgtttctgattgttttaccttcttgcaggtgattgaaagcattaataagtgtgatgtagacattcgaagagagttgtttaatagtatactggtaaagttgatttatttttgccttctttctcttttactgtatacacacacaaatagttcttatgtagagcttaatttagtttaccatggacttttgtggtgtaaaagaagaaaaatttactggggcatccttttttatgtagactcttggaagttattttgagattgggttggggggggggggggggggggggtgagtggtgccaaagttgtagtttcatgttgttagtatgttacatatatcggaatttgatttttttatttattattatcttgattggaattgtatgagttgtattttcagtcaaatgacattttttcccaaaactttaaccaacagatattgatgaaaccatatgtacatattttttaggtttagtttgtgatcacttgatagtttttgaagcattttatatcaatatatcattacctggtaagttaaaattgatttcatttatcacatgcagcttgctggtggtacagcttcaatgcaacaactaaaggaacgccttgagaaagacttgttagaggtatagtttaacaaatgaacccttgtctattttatccactgaatgacaatttggttgttggtgctgatttcaaatacctttgaagcttttgttgttttaacgtgttgtaatttcaagggtttttcttacaagtgaatttagttggtgtctcatcctaaatatcagagtagcttggttaattcctgctgtgttgactgccactaatacagccttgtgacttgtttcttatcttatgtgtagcagtgctagtgttattggagagatcttttgagctaatatatatttatttctctggttgcttttgggatgaaatcgtgtgatcttttaagttaattttctagtgaattacattaacaataacgaaacgttatataattgtaaagtacaatggtctgtttgtatgattgtgctcaaaatggatcataagcctttagccaaagcttctgcaggctggcacttctaatacaagaagataattaagttgaaaacatttatcaaaatctctctccggaatcaaatttgagtttataatattataaagatcaacacactggatttttttgaattaaatcatcaggtggcatgtgattgtccttgttcttcaagaagctggaaaggttaattgtagttgtaaaaattgactacaatttcatttctattgcaggaatcccctcaagctgccagagtaaaagtattggccagtgggaatgctactgaaagaaggtttaggtgcgttatctatcttatgtcgatgcacttattatggttttggtgtttgatgatgccatttccattgttgctgttttacttttctttcctggttatttcctgcaattgacaaatctggtttattataagttcaccatttctctctctctctctctctctctctgtatatatatatatatatgtttaggccttcgaaattgcacatatcagcatataacctatttggatatatatttgtggaaacagttcatgtgaacacgtatttttctgaatgtcaatttttatatgcaaatttacttttaatattttaaaaatggccaacaattcaatttcaataatggttatataattttggccttttaaagaaaaatgagaaactcaagaagcttgtgtaattgttttaaattctctgttctatcaattgataactctttaaaactctgatttgtctgcttatgtctgttttctggtgtctctggtatggtttattgaacttggaatttctgtaagctacaactctagacctttttcgttctgaaaccatttgggcagaagcaagagagaatgcatcataaatatgaaatgatagagatcctgttgatggaagttttgtaattgcatgaactcatgtgtgaatgatcacagttttgcaattcgtaccggataaagtataaaccatcttaaattgtttgaccagtgtcgtctgtttctgcctttacgtagatttagttttcttttaatactagtttttgggaaacccgctaagcttcgctctctcctttcccaacctctgattatgcttcaatttctctccaaaataagggggagactcagtaacattttaattggtgatgcactgtacatactgcgtcttctaactcaatgaatgactttatatgcagtgtttggatcgggggtagtatattggcatctcttggctccttccagcaaatgtggttctccaaatccgagtaattatctactgttcaccaaacttgtgattattagttcattaatgttaatatatatttcactttgcctatcttgtttcccccctttatcataaaagctaaactgccaaatagggctttcatcaaggataattttacactgaatcattttaatgcatttctgataggtatgaagagcatggagcttcatatatccaaaggaagtgtccatgagttgctgtttattttactgccatttatcaggaagtagtactgtgaacgctgatttagtgcttgtctactaatgaatttttatttcctatttaatggccattcccattagatccccattctaactacattattggcctcgaggtgaatcacagcccacctttaactaatctgtattgatgtaaacttgtaaagtgtgcctagagtttgtaacaatgccccgtttatcaaattagatttctactgtgta

SEQ ID NO: 20 - DNA, 3700 bp, Glycine max
  source 1..3700: mol_type = genomic DNA
cacattgcatctcgtggttcttatattgaattccaatttccatttccacttggtccttctctctctctccctctttctcgtcactagctctgtgcattcttctctcgctctctgccttccatcacactcggcatttcctttcccaaggtccgtttctttccctcgatccgtttctctttcacttggatctgtttctttgatttccgttttcaattttcacctttcaattttggttttttcttcaattcgaatggagtattctgcgtttttgttttattagttgttgggtagctggatttcaattgggtcgctgttagatttcgatttatccattgggtgtgagaaatttttgatttttttctttttgatagctttttaagtggatgtgcgttggattattgttagatttttggtctgtttggtgtttctttagaatctttttaatctggctcgtttaaaattgatcgatctgggtgttggttatgtagtaggcgttttttcttgttttattttgaataaaagaaccattttgattggtttaaatggttacatcatgcgtcgttgtctttgtatattggagatttgtggtagatagggatggatctgtcgttgttgaggatggttctgtcaaaagtgtggtatttgaggatgagttgtaacgaatctgaattgttgtttgaggttgagagaacccaatgatttgtattagtttactttttgccgtgatgcaattaattagcgatgtttaaaatgttggtaaagtgtggtgaacctccctctctcttaaaactgaaagcagagatacagaaaaggaaatgtaataatgctttgcctttgtggaccctttctttggatatttacaacggtttgagtgttccctacccttctaacaacctactattatgtctcatgatgcatgtctaatcaacttattctgttgtcaacctctttgctcttgtctgaggaatgtaggatgtatgtgtacagtatgtacttttatttgggttttactatgttgggacacacttatgtgtatcatttaattcgggatacaagtttcttttctatgttaaatactactatcagtctggtagtcatcttcccgacttgtttattgtatattattgctatgttataatatatctgtacagtgtacactattaatcgttttcttacatgatgctttgtccatgatatacccatctcttagtttttagggctacatgatggatgttattttgaaatgacttgctgtgggactaatctgcctaaaggaatagaaaaattaaaacaaaagaagaacaagggaatgtataagatttaagcttatatgtttcccctttttgttatgtgtgattgcaattggttagcttactgcttgtgtctgtcattggacatcacttttgtttataaaccaaaaggattgaggatagttgaaattgatttggctaagtttatgatttaattatgagatcctgtcaatgagtcctttgatttggagtttttctcggtcactttttcatagtatgccatggaagtggagagaaacaagattagtatagggattgtcttgttcaaaacaagatttggctgtgtttactgaatattcatcatttatcctgcagatagtagaagatggcagacactgaggatattcaacctcttgtttgtgacaatggaacaggaatggttaaggtacatgagggatcttttgtttgtgtattaaatttgttgataatgtaactttgacatactttttattggttttatgggaatatcattttacattaatgttacttctgtgaatttgaaaaattaattgcaatgaatctttgtaggctggatttgctggagatgatgccccacgtgctgtgtttcccagcattgtaggtcgtcctcgtcacactggtgtgatggttggcatgggccaaaaagatgcatatgttggtgatgaggcacaatctaagaggggtattttgactctcaagtaccccattgaacatggaattgtgagcaattgggatgatatggaaaagatttggcatcataccttctataatgagcttcgtgttgccccagaagagcatccagttctcttaactgaggcccctcttaaccccaaggctaatcgtgagaagatgacccaaatcatgtttgagaccttcaacacccctgctatgtacgtagccatccaagctgttctttcactgtatgcaagtggtcgtacaactggtaagcaattttttatttgtttggttagcttgaggctgtatagtttgaacttatctgggaactttgaaattgaaataaacacatgtcaacatccattagcatctataaagtctgtatgttcaacattgcatttccagatatattagaataaactgaaaatgattcatttcattgtgaatgatttcacttgacatattactaaatggggaagaaacacattctgtgaactgcattgcatttggaaattgtgattgtagaaaacttgtataaagcttccatatatcatgtgattgactttataaacttcatttatttgccttctttttgcaggtattgtgttggattctggtgatggtgtcagccacactgtccctatctatgagggttatgcactcccacatgccatccttcgtcttgatctggccggtcgtgacctcactgatttcttgatgaaaattttgactgagcgtggttattccttcaccacctcagccgagcgggaaattgtaagggatgtgaaagaaaagctgtcttacattgcccttgactacgagcaagaactggagacagccaggaccagctcatccgtcgagaagagctacgagttgcctgatgggcaggtcatcactattggcgatgagcgtttcagatgtccagaggttctgttccaaccatccatgatcggaatggaagcttcaggcattcatgagacaacatacaactccataatgaagtgcgatgttgatatcaggaaggacctttatggtaacattgttctttcaggaggaacaaccatgttccctggtattgctgacagaatgagcaaggaaatttctgcattggcacccagcagcatgaagatcaaggttgtagcaccacctgagagaaaatacagtgtctggatcggtggttctatcttggcatctcttagcaccttccagcaggtttgttctcttcattttttttcctgcttcttggaatgttatgttatcgtgagatacattcttctatgctaataataatgacacgaactgttgttttgagtgcagatgtggattgcaaaggcagaatatgacgaatctggtccatcaattgtgcacagaaagtgcttctaaactgtttcgatagatagggttattgaagggaaagactactatcatcacgatttgtctggaagcaatgcattgcagattgtaaccctttgattctagcttttgttatcctttcattttattctcttgttggagtgatcatttatttgcagaaggtgaggagagttgttttttaaaatggtccagttcttttcttatactttgataagtttttaactggttcattctgagtatgagttagctggattatatcaaactacgcttgtacccttggtatgcataattataatccttcatccgttgaactacaagttaactcttttcaaatacaacagtagcaagttaattcactgagc

SEQ ID NO: 21 - DNA, 3623 bp, Glycine max
  source 1..3623: mol_type = genomic DNA
gatccccccctctctctctctcatcactacctctgcatttttctctcgctctctgccttccatcaccctcgccatttcccttcccaaggtccgtttctctccctcgatccgtttctctttctcttggatctgtttcttccgtttccgttttcaattttcaccattcaattttggttttttcttcaattcgaatgggagtgttctttgttttcgttattttattgttgggtagctggatttcaattaggtcgttgttggatttcgatttatttcactgggtgtgagaaatttttttttctttttgctagcttttttaagtggatgtgggttggattatttttagatttttggtttgtttgatgtttctttaggttttgttcaatctttttaatctatgttgtttataattgatcgatctgcttgttatttatgggaggatgcgttttcttgttttattttgaagaaaagaacgattttgattggtttaaatggtaacatcatgcgtcgttgtgtttgtatttttgagatttgtggtagatggggatggatctgtcgttgttgaggatggttctgtcaaaagtgtggtatttgaggatgagttggtaacgaatctgaattgttgtttgaggttgagacaacaccatgatttgtattagtttacttttttgctgtgatgcaattaattagcgatgtttaaaatattggtaaagtgtgctgaacctccctctcttaaaactgaaagaagagataccgaaaaggaaatgtaataatgctttgcttgtggaccccttggaaatttacaacggtttgagtgttccctatccttctaacaaccaactattatggctcatggtgcatgtctaatcaacttattctgttgtcaacatctttgctcttgtctgaggaatgtaggatgtaggagtgggtatgtgtacagtatgtacttttgtttgggttttactatgttggaacacatttatgtgtatcatttaattcaggatacaagtttctattccatgttaaatatctgtctggtagtcattttcccgacttgtttattgtgtattgctatgttacgatatatctctgcactaataatagttttgttacatgatgctttgtccatgatatacccatcccgttatctttaggtctacttgatggatgctattttgaaatgacttgctgtgggactaatctgctcagaggaatagaaaaattaaaacaaaatgaagaacagtggaatgtataagatttaataataaataatatatgtttcccctttttgttatgtgtgattgtaattggttagcttactgtttgcgtctgtcctaggacatcatttttgtttataaaccataaggattgaggatagttgaaatggatttggttaagtatatgattaaattatgtgatcctgtcaaagagttctttgttttggtatttttctttgtcactttttcatagtatgctatggaagtggagagaaatttgatttgtgtagggattgtcttgttcaaaatttcccttccaatgttttattggctgtgtttacagaatgcacttctactgaatattcatcatttatcctgcagatagtagaagatggcagacgctgaggatattcaacctcttgtttgtgacaatggaacaggaatggttaaggtacatgatggatcttttgtttttgtattatttgttgaataaacttactgtcatactcttgttggttttatgggaatatcattttacattaatgttacttttgtgaatttgaaaaattaattgcaacaaatatttgtaggctggttttgctggagatgatgccccacgtgctgtgtttcccagcattgtaggtcgtcctcgtcacactggtgtgatggttggcatgggccaaaaagatgcatatgttggtgatgaggcacagtctaagaggggtattttgactctcaagtaccccattgaacacggaattgtgagcaattgggatgatatggaaaagatttggcatcataccttctataatgagcttcgtgttgccccagaagagcatccagttctcttaactgaggcccctcttaaccctaaggctaatcgtgagaagatgacccaaatcatgtttgagacctttaacacccctgctatgtatgtagccatccaggctgttctttcactttatgcaagtggtcgtacaactggtaagccattttttatttgtttgattaacttgaggttgtatagtatgaacttatctgggaactttgaaattgagataagcatatgtcaacatccatgagaatctataaagtctgtatgttcaacattgcatttttggatattttaaaataaactgaaaatgattcatttcattgtgaatgatttcacttgacatattactaaatggagaaaaaacaaattctgtgaactgggaattatgattgtagaaaactgctgtaaagattccttatatcatgtgatcgacttttaaaactttatttatttgccttctctttgcaggtattgtgttggattctggtgatggtgtcagccacactgtccctatctatgagggttatgccctcccacatgccatccttcgtcttgatctggctggtcgtgacctcacagatttcttgatgaaaatcttgactgagcgtggttattccttcaccacctcagccgagcgggaaattgtaagggatgtgaaagaaaagctttcttacattgcccttgactacgagcaagaactggagacagccaggaccagctcgtctgtggagaagagctatgagttgcctgatgggcaggtcatcaccattggcgatgagcgtttcagatgtccagaggttctgttccaaccatccatgattggaatggaagcttcaggcattcacgagacaacatacaactccataatgaagtgcgatgttgatatcaggaaggacctctatggtaacattgttctttcaggaggaacaaccatgttccctggtattgctgacagaatgagcaaggaaatttcggcattggcacccagcagcatgaagatcaaggttgtagcaccaccggagagaaaatacagtgtctggatcggtggttctatcttggcatctcttagcaccttccagcaggtttgttctcttcctttattctttttcctgcttcttggaatgttatgttgttgtgagatagtacattcttctatgataataatgacacacttttgttttgagtgcagatgtggattgcaaaggcagaatatgacgagtctggtccatcaattgtgcacagaaagtgcttctaaaactgtttgagagatagggttattgaagcgaaagactactatcatcatgatttgtctggaagcaatgcattgcagattgtaaccctttcattctagcttttgttatccttttcatgttattctcttgttggagtgatcatttatttgcagaaagtgaggagagttggttttttttttttttttttaaatggtccagttcttttcatatacattgataagtttttgactggttcattctgagtatgagttagctggattatcaaactacgcttgtacccttgttatgcataattataatccttcatccgttgaactacaa

SEQ ID NO: 22 - DNA, 2728 bp, Glycine max
  source 1..2728: mol_type = genomic DNA
gatgaaaagaagagaagggggtgggggtggggtgtttatcttttcctttttcttgtccgttcttttttatcttcttccgaaattaactttatccattatttgcttccgtaaattcctctctatttggtatgcatagagagagagagagagagagagagagagagagagagagagagagagagagagagagagagagagaatgaatgggtaatataaatgtagtagctctgttccgtcaatttctctttctctctctaaaattaatacagggagcgagaatccaatggtcccgattgggtgtaatggttgttatattcatttgaattaatttggttcattttgtgtctgactttcttagaggatcactcttcttccatcctttcctctctctctctccctctgcatttcccaaggtaggcattgtattctccgtcccattgtcaatttttcaattcatctactttgccttgtttaattctctgcaatgtcattgtgttctagttattttgattttttgcggatagggctggatttgtcaatgctcaggtcattctattcacaccattaatctgcttgttaattttgtaaattactgcctatgatttatcccatcccacatgacaggataggagatttcataaatcattcctcatgactattctttttccttggacctagttttatttatttttagtttgttcaatatgtaatagataattgatttgtggctaaatagtgagtgcattgttccgtcactactttgttcttctaatttaatcaaaaaatatatgagaaaggctaagaacacactcctgttgtgcagttgaaatttattgaaaatcatgaaattttgtggatcacatatcctatataatgaatttttcccggattttttttaatcttcaattaattttaataaataaaatagtgtgttgtttatccagcagagcagatattagaagatggcagacgctgaggatattcaaccccttgtttgcgacaatggaactggaatggtgaaggtacaaaatgcatactttttggtttgatgcttctcgagagaattgttttgcgttaacttttgcccttcattgaaattgcaatgtgtcttttcaggcaggatttgcaggagacgatgccccacgtgcagtgtttcctagcattgttggtcgtcctcgtcacactggtgtgatggttggtatgggccagaaagatgcatatgttggtgatgaggcacaatctaaacgtggtattctgactctcaagtatcccattgagcatggtattgttagcaactgggatgatatggaaaagatttggcatcataccttctataatgagcttcgtgtggccccagaagagcatccagttctgttgacagaggctcctcttaaccctaaggctaaccgtgagaagatgacccaaattatgtttgagacctttaatgcccctgctatgtatgttgctattcaggctgttctttcactgtatgccagtggtcgtacaactggtaagatattcttgaacattatttgcttttgtgaggttcaggctgaagtttgagcttatctatagaatgagagtgtcattagacagcatgcacctggtttacaatggaatgattcttcattgtagaaaattgttttaaaacaatcagtgtcctcatcaaccaggaggtgctcatatgttgttttttttttgttctccatttcagttttccattatgatgatctatttttcttcttgttacaggtattgtgttggattctggggatggtgtcagccacacagtccctatctatgagggttatgccctcccacatgcaatccttcgtcttgatttggctggccgtgacctcacagatttcttgatgaagattttgactgaacgtggatattcttttaccacctcagcagagcgtgaaattgtgagggatatgaaggaaaagctggcttacatagccctcgactatgagcaagagctagagacatccaagaccagctcttcagtggagaagagctatgagttgcctgatgggcaggttatcactattggcgctgagcgtttcaggtgtccggaggtcttgtaccaaccatccatggtaggaatggaagcatcaggcattcatgaaacgacatacaactccataatgaaatgtgatgttgacatcaggaaagacctgtacggtaacattgtcctttcaggaggtacaaccatgttccctggcatcgctgatagaatgagcaaggaaatctctgctttagccccaagcagcatgaagatcaaggtggtagcacctcctgagagaaagtatagtgtctggattggaggttctatcttggcatccctgagcaccttccaacaggtatgtttctgttctttaatatgattaatgaactattgctttgaatgcttgctaatgatacaaattatcgcttgagtgcagatgtggattgcgaaggcagagtacgacgagtctggaccatcaattgttcatagaaagtgcttctaaattgtttgagcaatagggttattgaagaaaaagatagttgttttattcctcgggaagaaatgctgcttgcttgtaaccctttcattctattctaacttttgttactcattcacgttattctctggagtggtgatttggagaaggcgaggagtttgttttgtcataacagtgcaattcttcactattattatatatttttatttttttgagattca

SEQ ID NO: 23 - DNA, 3101 bp, Glycine max
  source 1..3101: mol_type = genomic DNA
tttgccctaacgcggcaatatcttaagatacaccaagaccaaacatccattaacaacagaaatcttgatccgcttgtgaattactaattaactttccgtcgcaaatgaggaagctgcatccacttttagcagttagaaattgagcacttggcgtttgtagtacctgcagagtcgcatgattttaagcctgaacaactcaccatgcataactaggttcgaacaagtcatactttgtcgatatctttttcaatgttttgctggcattcttaaatcttaatattgtggttataaaagtgggtcctcaagtaatattaaattgaaagttgattcatctgaaaggctgtgtgtagaatcattgatgtattttcttaaatctttgccttgacactccactccataattagaggaaaagaaaagaaggggtggggtggggtgttcatcttttcctttttcctgtccgttcttttttatacattgaaattaaccttccgtaaattcctctctatttggtatgtatagagaaagagagaatgaatgggtaaaatataaatgtagtagctccgttccgtcaatttctctttctctctccaaaattaaaacggggagcgaggatccaacggtcccaattgggtgtgatggttgttatattcatttgaattaatttggttcattttgtgtgtttctcagagaatcgctcttcttccatcctttcctctcctctctccgcatttcccaaggtaggcattgtattctccgccccagcaatcgcattgtcaaattttcaattcatctactttgccttgtttaattctctgcaatgtcattgtcattgtgttctagttatttagatttgttgcggatagggctggatctgtcaatgttaaggccattctattcacaccattaatctgtatctctgtttgttagttttgtaaattactggctctgctttctcccttcccacaggataggagatttcataaatcattcctcctgtctattctttttccttggacctagttttatttattttttaatttgttcaatatatagtagataattaatttgtggctaaatagtgagtgcattgttcggtctctgttttttgttgtaatttaagcaaaaaaaaaagaagagaaatgctagtaacacactactcctttcatgttggttgaaacttgaaatttattgaaaatcagaattttgtgggtcacatatcctatgtcattttgtaattttcaattaattttaatcaataaaatagtgtattgttaatactcctaaaaaatatatattggtctcatcactcatgtcatgccatcccttgccactacaactatttgttgtttatccagcagagcagatattagaagatggcagacgctgaggatattcaaccccttgtttgcgacaatggaacaggaatggttaaggtacagaatgcacactttttcgtttgatgcttctcgagggaattgttttgcgttaacttttccccttcgttctaattgcaatgtgtcttttcaggcaggatttgcaggagatgatgccccacgtgctgtgtttcctagcattgttggtcgtcctcgtcacactggtgtgatggttggtatgggccagaaagatgcatatgttggtgatgaagcacagtctaaacgtggtattctgactctcaagtatccgattgagcatggtattgttagcaactgggatgatatggaaaagatttggcatcataccttctataatgagcttcgtgtggccccagaagaacatccagttctgttgacggaggctcctcttaaccctaaggctaaccgtgagaagatgacccaaattatgtttgagacctttaatgcccctgctatgtatgttgctattcaggctgttctttcactgtatgccagtggccgtacgactggtaagatattcttgaacattatttggttttgttaggttcagattgtagtatgagcttatccgtacagtgagagtgtcatcagacagcatgcacctggtttacaatggaatgattctttattgtagaaaattgttttaaaactatcagtgtcgtcatcaaccaggaggtgctcctatattgtctgtttttttttctttctccatttcagttttccaatatgatgatgatctattttcctttttgcaggtattgtgttggattctggggatggtgtcagccacacagtgcctatctatgagggttatgccctcccacatgcaatccttcgtcttgatttgggtggtcgtgacctcacagatttcttgatgaagattttgactgaacgtggatattcttttaccacctcagcagagcgtgaaattgtgagggatatgaaggaaaagctggcttacatagccctcgactatgagcaagagctagagacatccaagaccagctcttcagtggagaagagctatgagttgcctgatgggcaggttatcactattggcgctgagcgtttcaggtgtccggaggtcttgtaccaaccatccatggtaggaatggaagcatcaggcattcatgaaacaacatacaactccataatgaaatgtgatgttgacatcaggaaagacctgtacggtaacattgtcctttcaggaggtacaaccatgtttcctggcatcgctgatagaatgagcaaggaaatttctgctttagccccaagtagcatgaagatcaaggtggtagcacctcctgagagaaagtacagtgtctggattggaggttctatcttggcatccctgagcaccttccagcaggtctgtttctgttctttaatatgactaattaactattaactattgctttgaatgcttgctaatgatacaaactgtcgcttgagtgcagatgtggattgcgaaggcagagtacgacgagtctggaccatcaattgttcatagaaagtgcttctaaattgtttggttgatagggttattgaagaaaaagatagctgttttattcctcgggaagaagtgctgcttgcttgtaaccctttcattctattctaacttttgttatctgtttacgttattctctggagtaatgatttggagaaggcgaggagtttgttttgtcaaaa

SEQ ID NO: 24 - DNA, 2979 bp, Glycine max
  source 1..2979: mol_type = genomic DNA
cacatgtggatccagtgggtcgaatctaggcccaaattgagaaagcagtagtggtaaatagtaaccctaaaaatgggccaagctaataaaagaaatgtatcagcggagccacagatcgaaaggacacgcgtgacgaacaacatgaatgtcgttcatagaaccggacgttgttgagttgaggtaatgtcgtgtggacgtgaacgaacactttcatttaaaaatccaaacaccattgaatgttcaggtttgatttcgccgtccccttccgtctatcatttttttctttaccttcaggttagttaattcctaacttcatcttgtctcatttgttagagttttagacaatatatattaattttgcaaatgtgttgtgatgctagctaggctttatcgaatttatcatgagattgttgttttgttcaagataactgaatctatttgattacatgtttgagttgtatccatagttccaggctatgatctgtttgtggtcgatatattttgaaaattaaaattgtttcatctttacacacctctcactgttctgagatgaaatagatgctttgtgcagttttttttgaaagataatggcagacaccgaggacattcaaccactcgtctgcgataatgggacaggaatggttaaggtaaaaaaaataaaatacgaggatgattttattatttccaaattttgcttgtagaagtgatttggatagtatgttcttttttgcttggcgtactttgacacatgcatgtgaagggtaccttttgatttgacctaatttactctggattgaaatttgcaatttgcaatgtgtaggctggttttgctggagatgatgctccaagggcagtgtttcctagcattgttggtcggccacgtcacaccggtgtgatggttgggatggggcaaaaggatgcatatgttggggatgaggctcagtccaagcgtggtatactaactcttaaatatcccattgagcatggtattgtgagtaactgggatgacatggagaagatctggcatcacactttctacaatgaactccgtgtggcaccagaggagcatcccgttctcctcactgaagcacctctcaacccaaaggctaatcgtgagaaaatgacccaaattatgtttgagaccttcaacacacctgctatgtatgttgccatccaggctgttctatcactctatgctagtggccgtactactggttagtctttcttgtactggctatgataaacaagcaatgctctgcaaggtttaattttccatcgggaatatgaccagatattgaatgtagaaaaataaaagggtctattaaggacatgtttgattctcttctcactttttggttttaaaaaatgttttctacaacaatttcattctattcaacaatcaatttctcaccccaaaaaaacaagtgttttaaagaccataaaacagaaatagctagaagatgtttttattttgttcaacctctccctcaattgcacattctgctctatgccttgcacacccctccaccagttttctaagcaacctagtttagttggattttgaaaactaaatacagtttttgaaactcaattccaaaaactttggttttctccctaccaatttatatctttttaatctgacttgaagtaattgagctagcctggttgaggttgtctagcttggctggttgcccttatgcttgttacattaatttatgtaggtattgttctggactctggagatggtgtcagccacactgttcccatttatgaagggtatgccctccctcatgccatcctccgtcttgacttagcagggcgtgacctcactgatgccctgatgaaaatccttactgagcgtggttattccttcactaccacagccgagagagaaattgtaagggatatgaaggaaaagctggcctatattgcccttgattatgagcaagaacttgaaacttcaaaaactagttcttctgttgagaagagttatgagctacctgatggacaggtcatcaccattggtgctgagcgtttccgttgtcccgaagtcctcttccagccatccatgattggcatggaagctgttggcattcatgagaccacatacaattcaattatgaagtgtgatgttgatatcaggaaggacttgtatggaaacatagttctcagtggtggttctactatgttcccaggtattgctgatagaatgagcaaggaaatcactgctttggccccaagcagcatgaagatcaaggtggttgctccacctgagagaaagtacagtgtctggattggtggctctatcttggcttctctcagcactttccaacaggtaaacattctgtggtgattcagtgattttaatgaccaaagtaatttgtgtttgtgttgtcaaaatgataaatccaaaatggtgatgcctcatgcactttagtatgtctctgattgtctttattttagttctagttctgatatctaaatctctcaatttgataatagctggttgcttgaattttgtctccttctcacattagttgaagttataggacaattgggatttgtgtaacttctatgaatatccagcagcatcctcatgcaaatttgggcaaacaccctagaatgttgttttgatatggttaatttagtagggatattgatgataaggatcttatttttggaaatgcagatgtggattgcgaaggcagagtatgatgagtctggtccttcaattgtacacaggaaatgcttttaaatgcagcagaatggcttggtgtaggtacagcgtcctcgttttgcaatacagtagcaccttgcaccgattgaagatttttcttaaaaaatgtttgtgttattagaacagtgaactgagataaagtggagtttgatggcagaattaattctttcatttgttttgttttaccattgtaattgttcagcagttgatttttaatgataaatgaaaaccgtttcagctta

SEQ ID NO: 25 - DNA, 3760 bp, Glycine max
  source 1..3760: mol_type = genomic DNA
gaaacgaaaatttaggcccataataaagtgtgtgatgaatagaattaggaggtggaaataatgggagcgccaaatttggggcaaggtatgaaaagccgtggaagtgggctatatttgaagtttcaccgcacgtttgattttaataaaacaaacaggtatagccacaagatcgaaggaacggtgttgatgcgttattagggtcaaaaacggaatttaaaaaacgcaagtccacgacggagggcgttacttctgttcagttttgaacccaaaaagcggagaagcttctcttctcttctctctttctttcaaaccgccatctccttctccttctccttctccttcttcaggtcgctttctctctctcttcttattttttcgttcgtcgtttcgattgcgacattgccgtttatctcgcattatgctgtttgttgtctgcttcactggttctgatgatacttattgttgaattatggttttatgttcttaatgacacgagtttttcgtcgaatttatgcaatcggaattctgattatggaatcattggattttgttgcgttatttattgttatgccgcgtaacatacatcattacctgtttgaaaaatattgaaatctgaaagtgtcgaaaacgattgtcgctctagacaaaatctcgttaataatcagatcgaaaaaatgagctgctgaaatctgaaagtgtcgaaaacgattgtcgctctagacaaaatctcgttaataatcagatcgaaaaaatgagctgctgaagcttcttgttcaattcaactgaatcaatgtcaacaaggcttttaaattgcgatgattcttgatattgcagaaaatcgtgaacaaattccagctgcaatcgcggttgcgttgcggtcgcagtcaagaatgctcgtcgttttttttttttaaatcttgaatgtgctaacgatataagaattataactacacttttaatcgaataaaatgaaaatttcttctgtgttaataggttatgtatgaagtttaacgtgtttatcataaacttttacagtattatcgaattctagttaaattgaatatgaaaagaaattaaattttattaaaagtatagtaataaacaattggttttagttttgagtgagtgtaaagcgatttaaaatacaatgcttaatcataaccgttagtgttaaattcattgttaaacttgcagtctggtctgatatgaacaacaattggtttatagcttttcatattgaaattttgcatgacgtgagaatttagagtttatttgccttttaatagatttttccaaatttttaatgttctctcatattgagatcttctgcactttcattttcaaccagacaaatcctaatctttcaaaagatttgtttttgtatcaaattgaagtatgaaagttatttttaaacctatcagtcagatttagaactgcacctcatgaagttcaattatcaactcaaggggatcgaattcctgatctatgtaaggtgtgtctagattctagagagataaatataaattattttcacatgacccggcgaagtgaagatatcaaggaagagaatgataccggtgatttagacccttaggttatatcctaaattctgtaaaccttttgttgtagccaggatcactttagtagatgttgcatttgtttaggctctgcatgtgaaatgtctttgttttcaatgtgctgagcgattcttttattttattttttattttttcagctgttgaaaataaaaaatggcagacggtgaggatattcaaccactcgtctgtgataatgggacaggaatggttaaagtaagatagatatctggacggttttatttccaatatttttgttcctacagtgattagctagtacttttcaatttctattgatttaccgtgagtctactgtattgtaatgtttaggctggatttgctggggatgatgctccaagggctgtgtttcccagcattgttggtcgtccccgtcacacgggagtgatggttggcatgggccaaaaagatgcatatgtcggggatgaagctcagtccaagagaggtatattaactctcaaatatcccattgagcatggtattgtgagtaactgggatgacatggagaagatctggcatcacaccttctacaatgaactccgtgtcgctcctgaggagcacccagttctgctcaccgaagcacctctcaacccaaaggctaatcgggagaaaatgacccaaattatgtttgagaccttcaatacccctgccatgtatgttgccatccaggctgttctatccttgtatgccagtggccgtacaactggttagtcattacttcaagaaattattctgttccatctataagctacactctaaaattattaagctggttaattttaaactttcaatgctctgtggaggctcttattgtttttcccgtgacaatatcatacttaagttgtggttgaaaactctatatcttcctaatctaactagaagttttagaactgatttctctgtttctttcatgcttgttgaattaatttgtacaggtatcgttctagactctggagatggtgtgagccataccgtccccatttacgagggctacgctctccctcatgccatcctccgtcttgacttagcaggacgtgatctcactgatgccttgatgaaaatccttacagaacgtggttattccttcactaccacagctgagcgtgaaattgtaagggacgtaaaggaaaagctggcttatattgcccttgattatgagcaagagcttgaaacatcaaaaaccagctctgctgttgagaagagctatgagttgccggatggacaggtcatcaccattggtgctgagcgtttcagatgtcctgaagttctcttccagccatccatgatcggaatggaagccgctggcattcatgaaaccacttacaattcaatcatgaaatgtgatgtcgatattaggaaggacttgtatggaaacatcgttctcagtggtggttctaccatgttcccaggtattgctgacagaatgagcaaggaaatctcagctttggccccaagcagcatgaagattaaggtggttgctccacctgagagaaagtacagtgtctggattggtggctctatcttggcttctctcagcactttccaacaggtaaacgttttgctatgattctaattcatggatttaatttctttaaattgagcaaatgtgtaaagtaagaatgtaaaggtttatctgccatcaagtcaaaagttattgaagattacgagacattttaattgaaaccaaccgtagatatatatccttactttctcactgtacacttaaacctgatgataattgtatgaccgagagattatgcatgtgcctttctttcttttagttctagtttcgattcccagatcaattatccctatattgccagttgcatcatgtggtgttgggatactaatattaggacatcatgtttgaaatgcagatgtggattgcaaaggctgagtacgatgaggctggtccttcaattgtacacaggaaatgcttctaaatgctgcacagcctacagggtagcttggtgaaagaaattaaaatacggcgttctcgttttatatgatgaaaaaatgtgttgttaaatcagataactgagttgatggcagagtaaattctttcacttgtttttgttttattattggtaattgtttaacgattaatctttagttatcactataaatcaacgcctttcaacttaaaa

SEQ ID NO: 26 - DNA, 2658 bp, Glycine max
  source 1..2658: mol_type = genomic DNA
gcgcgcggagccacagatcgaaaggacacgcgtgacgatcaacatgaatgtcgttcatagaaccggacgttgttgtgttgaggtaatgttgtgtggacctcgacactttcatttaaaaacccaaacaccattgaatgttcaggtttgatttcgctgtccccttccgtcgtctatcacttcttctttttttttcttttttttaccttcaggttaacttcatccttgttttgttaatcattctcatgcattccttcttttttttttctaacttgaaaacacacatttgaagagttttagacgatattaatgttgcaaatgtgtcgtgatgctagctaggctttatcgaatttatcataagattgttgttttattcaagataactgtatttaattacatatttgagtcgtatccatagtttcaggctatgatcattgatcagtttgtggtcgattattgtataatatactttgaaaattaaaattgtttcatctttacacctggtcacgtctctcaatgttctgagatgaaatggatgctttgtgcagttttttgaaagacaatggcagacactgaggatattcaaccactcgtatgcgataatgggacaggaatggttaaggttaaaaaaattacgaggatgattttattatttccaaattttgcatgtagaagtgattttgttttgcttgccgtactttgacacatgcatgagaagactaatttactgtgagtgttttgcaatttgctatgtctaggctggttttgctggagatgatgctccgagggcagtgtttccaagcattgttggtcggccacgtcacaccggtgtgatggttgggatggggcaaaaggatgcatatgttggggatgaggctcagtccaagcgtggtatactaactctgaaatatcccattgagcatggtattgtcagtaactgggatgacatggagaaaatctggcatcacactttctacaatgaactccgtgtggcgccagaggagcaccccgttctcctcaccgaagcacctctcaacccaaaggctaatcgtgagaaaatgacccaaattatgtttgagaccttcaacacacctgctatgtatgttgccatccaggctgttttatctctctatgctagcggccgtacaactggttagtctttcttgtgctggctaataataaaaccagcaatgctatgcaaggtttaatttgccaatgggaatgaatatggaccagatactgaatgtgaaaactctacttctttttaatctcacttgaagtaattgtctggcttggctggttgcccttatgcttgttccattaatttgtgtaggtattgttctggactctggagatggtgtcagccacactgtgcccatttatgaagggtatgccctccctcatgccatcctccgtcttgacttagcagggcgtgacctcactgatgccctgatgaaaatccttactgagcgtggctattccttcactaccacagccgagagagaaattgtaagggacatgaaggaaaagctggcatatcttgcccttgattatgagcaagaacttgaaacttcaaaaactagttctgctgttgagaagagctatgagcttcctgatggacaggtcatcaccattggtgctgagcgtttccgttgtcctgaagtcctcttccagccatccatgattggaatggaagctgttggcattcatgagaccacatacaattcaattatgaagtgtgatgttgatatcaggaaggacttgtatggaaacatagtcctcagtggtggttctaccatgttccctggcattgctgacagaatgagcaaggaaatcactgctttggccccaagcagcatgaagatcaaggtggttgctccacccgagagaaagtacagtgtctggattggtggctctatcttggcttctctcagcactttccaacaggtaaacattctgtcgtgattctaatgaccaaagtaaaatttgtgtttctgttgtcaaaatgataaatccaaaatggtgttgcctcatgcactttattacgtctctgattgtctttattttagttcgagttctgatatctaaatctctcaatttgatatatagctggttgcttgaattttctctcctcctcacagcagttgaggttataggccactttggatttgtgtgacttttatgaataactagcatcatcctcatgcatttgtgcactccccctagaaattagaatgttgttttgatatggtcaatttagtagggatattaatgatgaggcacttgtttttggaaatgcagatgtggattgcgaaggcagagtacgatgagtccggtccttcaattgtacacaggaaatgcttttgaatgcagcagaatggcttggtgtgggtacggtgtcctcgtttgggaattcagtaacaccttgcaatgattgaagatttttcttaaaaaaaaatgtttgttatttgaacagtgaactgagataaagtggagtttgatggcagaattaattctttcatttgttttgtttaccattggtaaattgttcagcagttgatctttaatgataaatcaaaaccatttcagctgaatacttcttgcttcctcataatcttcatattcttctaattaaacaagagtcagatcctataatttcaa

SEQ ID NO: 27 - DNA, 2831 bp, Glycine max
  source 1..2831: mol_type = genomic DNA
acacacacacaaattcacacaaacataaaaaaaaaaaaaaaaaacacacacacactctcatacacacgttgtcgcgcacacattccttcattccgcaggtatcgccacgttctctcttccctctttcatccccccgataagaacaagcacccaccgtttaacgctaatttttgagtgtttttgttttttgcagcaacaaacaaacatcttttaccttaaacaacaatggccgatgccgaggatattcaacccctcgtttgcgataatggaaccggaatggtcaaggtatcaatttcccatgggatcataggttttcttttaccgattttgtcgatgactaatcttggcggcaaattaagtctttgtttaagggatctgagtccagttccatctagatcaacataatgttggtgacattggggggggggggggggggggtgttggcatttaggatctgttacaatgtaaaattattcttaattcttaattaataaaatgttaatgttgttgggtttgtgtgatataggctggttttgctggagatgatgcaccgagggctgtgttccctagcattgtggggcgtccacgtcacactggggtgatggttgggatggggcagaaggatgcgtatgttggggacgaggctcaatccaagaggggtattttgactctcaaatacccaattgagcatggaattgtgagcaattgggacgacatggagaagatctggcatcacactttctacaacgagcttcgtgtggctcctgaggaacaccctgtgcttctcaccgaggcacctcttaatcctaaggctaatcgtgagaaaatgactcagatcatgtttgagaccttcaacacccctgctatgtatgtcgctatccaggccgtgctttccctttatgctagtggccgtacaactggtaattgatctcaaccctgatctcaacccagcctcttgatttttgtttctttggtgtgacttgcatgttgggattgtgaggtttgtagatatgatgaaactattgatctgtgtttgtcgtttaacttggtgattttgtgagttacagatcatgtgtttatctcaatttaaaaaggattgcatgagcttcaaactaatccaaattgggcctatgtgtctttgtctgttagtttaagcttttgggatggttggatcatgacatggtaccaaattgatccatgttgtttccattaataacaaacaatgtcttatcccactaattaagatcggctacatggataacacgatgccatttatagctcgcttaaaaactaaagcttcaaggaatccttgttgtttccattattctaataaaaataaaataaaaatttcaatacagagtaaccattgtagcctattgttggatgttggatggtagtaaggagaaattcgtgagaatatgttaaagtgaaactttttgttcagtttgttatgtgtttgtatcatgaatgttatctagtaaccatttaatggcttggtattgagatgagttgatgtggtttttctatggtgtttgttgtaggtattgttctggactctggagatggtgtcagtcacacggttcctatctacgaaggttatgccctcccacatgcaatcctgcgtttggaccttgcagggcgtgatctcactgatgccctcatgaaaatcttgactgagcgtggttacactttcaccacatctgcggaacgggaaattgtgagggacatgaaggagaaactggcctacattgctctggattatgagcaggagttggaaactgccaagaccagttcagctgttgaaaagagctatgagctacctgatgggcaggtgatcacgattggcgctgaacgattccgatgccctgaagttctgttccagccatccatgattgggatggaatctcctggtatccatgagacaacatataactctatcatgaagtgtgatgtcgacattaggaaggatctctatggtaacattgtcttgagtggtggttccacaatgttccctggcattgctgataggatgagcaaggagattacagcattggcaccaagtagcatgaaaattaaggttgtagcaccaccagagaggaagtacagtgtctggattggaggctccatcttggcttccctcagcaccttccaacaggtaaactgcatgactataattacatattcctgaagcagttgaattttggaatgttaacgcagcaaataacttcggaaattatatttcaataatgagtaaaacctttaatcaaataaacattataacaaaataggaggaaataacaaacataatactcagctagatcaagagaatgaactagtctaaaatatatccttcttttgctgtgcttgatgggcgacagagtaagtacttgctgttaacgattgatggtaacaatgtagttactgaagctccttttttatgttttctttcccttgtgtagatgtggattgcgaaggcagagtatgatgaatctggaccatcaatcgtacacaggaaatgcttctaagttataatcatggagtgtgaaagctggaccagggaaattactatttatacaaatactacaaaaataccatctagtggttgaggaactttcatttcctactctttaccatccttttatctatcttgtttttgtgttttcctttctttggtatgttgagataagagcatgaaggctagcaagatatgtaagattcttttttttttctcccgttctgttgtagaagagatgtgaattgttacctatttggtttggttgaattaacaaattcttttcatgaagtattctgattaacatagtggtacggta

SEQ ID NO: 28 - DNA, 3303 bp, Glycine max
  source 1..3303: mol_type = genomic DNA
ggtacctcagccacacaaagccacgttcgttaaaaatagaaagcacaacacataagctacgcacacgtagcttccttcatttcggaaattctaaggtactcatcacatcacattctccaactttcttctttccttatttcacacattgcatcatcaattcttcgcaggtgacaattaattcgttaacagtttgcactcaattgtacattagcttaatctttttaatgtgagacttcgatcatgttgaaaatgcagcatttttttgtgcgatcatcatgaattgttatcttttgattaatctttttccttatgtgacacatagaattgacatttaataatcttattgacactaactcttgtttttaattagcttcattgtttatatgagaatttttgtaatgtttggtgtgttttgcagcaatcaataaaagatggcagatggtgaggatatccaacctcttgtttgtgataatggaactggaatggtcaaggtaatgtatatggattcatttttgtgttgttttgcttgttcatcttaaaggtattggttttggacaaaaaaaatgcatttccatagattttttagtgttgttctccaatcagaatttggagttttacctcatcaattcgtattaacattgatggaacctttattaggaggataactaagctgaaattctaattctgatccacgaacaacatcaaaagcacaatagaactgcatctaagttttgtcttttggtttttgatgatactagattttgacccgtgggatacaaagagagaactaattgggtgagtacttcaaattatgttcaattttgcaggctggatttgctggagatgatgctccaagggccgtgttccctagcattgtgggtcgtccacgccacactggtgtgatggttggaatggggcaaaaggatgcatatgttggtgatgaggctcaatccaagaggggtattttgacattgaaatacccaattgagcatggcatagttaacaactgggatgacatggagaaaatctggcatcacactttctacaacgagctgcgtgtggccccggaagagcaccctgttctcctcacagaagcaccacttaatcctaaggccaaccgtgagaaaatgacacagattatgtttgagaccttcaacactccagctatgtatgttgccatccaagcagtgctttctctttatgctagtggccgtacaactggtaaagattcttcaatgtctgtttttccttttcttggtttctggtaatttggggcatggtgcatggtacttgtatctttagtgttgtcaattgtcatgacacttgtattttattagaatctcaagatgattttcaaataatatagtttaaatgtccatatgaaattgtgcgtgctaatcaattgagtttcagtcttttattttaaacattttgtgggaattaataatgtcatacatttgaatggtaggtgttgggataccaacattgtttggatgtcaattacctattgtgatgcctttgcatgccatatcttcataaacaaaattgcgatacattctaagggagtttcaatacatattaaaattgatttttcggcatggtgcatggtatttggttagaatttcaagatgattttttaatgagtatattttaaatggccattatgaaattgtatatactaatcaatcaagtttgatttttttatttataaacattttgtgggaattaatagagtcatacattctgtttatttcaatactagtgcagattttcaagaatgttaagtgagaatgagatctgagggacaatgaaatgggttgaaaacgtagtttttaactgtttgaacatgctttcatgtaggtattgttctggattctggtgatggtgtcagccacacagttccaatctatgaaggctatgccctgccacatgcaatccttcgtttggatcttgcggggcgtgacctcaccgatgccctcatgaagatcttaaccgagcgcggctactctttcaccaccactgctgagagagaaattgtgagagatgttaaggaaaaattggcctacattgctcttgactatgagcaagagctggaaacagcaaagacaagctcagctgttgagaagagctacgagctacctgatggacaggtgatcacgattggcgcggaacggttccgttgccctgaagtgctcttccagccatccatgattgggatggagtctcctggcatccatgagaccacatacaactccatcatgaagtgtgatgttgacatcaggaaggacctctatggtaacattgtgttgagtggtggctcaacaatgttccctggcattgctgataggatgagcaaggagatcacagcattagcaccaagcagcatgaaaattaaggtggtggcaccaccagagaggaagtacagtgtctggattggaggctccattttggcatccctcagcaccttccaacaggtacatcacttggctttgataacatatgaatgaaatttgtgtggttttgtattgttgattctggaaactaatcagggaactctatttgaagaataagtaggcaccaataaaattaagggaaaagaaaaggaggagggaataaccaacataatactcagttattaaagggaaaggaaactggtttaaattaaaattgatgtgaaacaaatgtagtttgcagaggttgatagtgtatggtaattgtacaacctttttttagcttcccttcttaaaacaagaagcttctctaattaacttttgtgaaagctccttttgtgctttcttcactaaaaatttactattattttctagggtctttttagaattatttttggttcaacttctcctttttaagaaaagaaccaaaaagttgtgctaacactatcttagtactgatctgatgcttttttctgataacacttaaatgttttcctgataatttttttctttcctgagagcagatgtggattgcaaaggcagaatatgatgaatctggcccttcaattgttcacaggaaatgcttctaataatgcagagagttcaggaaattttaatatatactccgtactacagaaataccataaagtggttgaggaagttttattttctattctttaccattttttaaccatgtttttgtgttttcctctattaatatgttgggataagaagagcgtgaaagcaaagcgtgatatataagattcttttttttattcattttcattttgttgtagaagagctgtgtattgttattgatttgatttggttgaatcaaattctcttttaagta

SEQ ID NO: 29 - DNA, 3149 bp, Glycine max
  source 1..3149: mol_type = genomic DNA
gacgagtgaaatgagtgagtgaggggggtgtaactggaaagcaagaaaaagcacaagagtgccagctatttccaacaacaaacgtggcccgtggatgcgatattggtaacggacggcgaggatggaaggacgtgcaatttgcgcttcatttgaggcgaatttcatttgaccagacctttcttttttaaaccacagggcgggtacctcagccacacacatacatcatcaaaaaacacacacgacacactcccatacacacacgttgtctcgcacacattccttcattccgcaggtatagccacgttctctcttccctctttcatccccggtgataagaacaagcacccaccgtttaacgctaattatatgtgtttttggtttttttttttttttttgcagcagcaaacatctttaccttaaacgacaacaatggccgatgccgaggatattcaacccctcgtttgcgataatggaaccggaatggtcaaggtatatcaatttttatgggatcataggtttttctttttaacccatgttataaatgtgaaatatttacccatcttgttgatgattaatcttcgcagcaaatttagactttatttaagggatccgagtccagttccatctggatcaatataatgccggtgatcatggggggtttggtgtttaggatctgttaggatacaattttttttcttaattaattttttgatagacaaatgttagttttgttagcagagataatcgaatttgcgatcttttcccttaatcattcaacccaccttatatcccccttaatagtgtgttaatgttgttgggatttgtgtgataggctggttttgccggagatgatgcgccgagggcggtgttccccagcattgtggggcgtccacgtcacacgggagtgatggttgggatggggcagaaggatgcgtatgttggggacgaggctcaatccaagaggggtattttgactctcaaatacccaattgagcatggaattgtgagtaattgggacgacatggagaagatctggcatcacacgttctacaacgagcttcgtgtggctcctgaagaacaccctgtgcttctcaccgaggcgccgcttaatcccaaggccaatcgtgagaaaatgactcagatcatgtttgagaccttcaacactcctgctatgtatgttgctatccaggccgtgctttccctttatgctagtggccgtacaactggtaattgatcttcatccaccttcttgattttttgttttttggtttaacgtgaatgttgggattgtgaggtttgtagatatgatgtgaaactacttatctgtgtttgtcatgtaacttgatgattttttaagttatagatcatgggtttctctaaattgaaatggcttgcatgagcttcaaactaatccaaattgggcctatgtgtctttgcctatttaagtttaagcttttgggggttattggatcatgacatggtaccaaattgatccctgttgtttccattaataacaaacaatgtcttatcccactagctgagactaagctacatggatcacatgatgccattcctcttggataaaaaccgaagcttcagctacagggaatccttgttgtttccattattctaatatataaaagtaaaaagttcgatacaaagtaacccctggagcctaaaagggtttggaattgttgggtggttgtaaggaggaattcgtgggaatattttaaaagttaaactttttgttcattttgttatgtgtttgtatcatgaatgttgaatgagatttgaaggtctagtagccatttaatgacatggattggtattgaaatgagttgatgtgttttttctatggtgtttgttgtaggtattgttctggactctggagatggtgtcagtcacacggtgcctatctatgaaggttatgccctcccacatgcaatcctgcgtttagaccttgcagggcgtgatctcactgatgccctgatgaaaatcttgactgagcgtggttactctttcaccacatctgcggagcgggaaattgtgagggacatgaaggagaaactggcctacattgctcttgattatgagcaggagttggaaactgccaagaccagctcagcagttgagaagagctatgagctacctgatgggcaggtgattacgatcggtgctgaacgattccggtgccctgaagttctcttccagccatccatgattgggatggaatctcctggtatccatgagacaacatataactctatcatgaagtgtgatgtcgacatcaggaaggatctctatggtaacatagtcttgagtggtggttccacaatgttcccgggtattgctgataggatgagcaaggagattacagcattggcaccgggtagcatgaaaattaaggttgtagcaccaccagagaggaagtacagtgtctggattggaggctctatcttggcctccctcagcaccttccaacaggtaaactgcatgactataaattacatatgcctgaagctgttgaattttgaaatgttaatacagtacattaaataacttggtaatttgtatttcaatagcaagtagaaacttgaataaaataaacattataacaaaataggaggaaataacaaacatgatactcagctagatcaagggaatagaactagtctaaaatatatccttctttcgctgcgcttgttgggcgatagagtaagtatttgctgtattcaactcaaaaaattgatagtgacagtgtatttactgaggctcctttttatgttttctttcccatgtgtagatgtggattgcgaaggcagagtatgatgaatctggaccatcaatcgtacacaggaaatgcttctaagttataacaatggagtatgaaagatggaccagggaaattactatttatacgaacactacaaaaataccatcaagtggttgaggaactttcattttcctaccctttaccattccttttatctatcttgtttttgtgttttcctttctttgatatgttgagataagagcatgaaggctagcaagatatgtaagattcatttttttttatcccgttttgttgtagaagagatgtgaattgttaccgatttggtttggttgaatcaacaaattcttttcctgaa

SEQ ID NO: 30 - DNA, 3372 bp, Glycine max
  source 1..3372: mol_type = genomic DNA
catttgccacaacttgccttttttaaaccaaactgcgggcacctcaggcctcagccacacaaagccacgttcgttaaaaatagaaagcacaacacataagccacgcacacgtagcttccttcatttcggaaattctaaggtactcatcacaacacattctccaactttcttctttccttatttcacacattctatcatcaattcttcgcaggtgacatttaattcgttaacaatttgcactcctttgtacgtttttagcttaatctttttaatgtgagacttccatcgtgttgaaaatgcagcatgtttttgtgtgtgatgatcatgaattgttatcttttgattaatcttttttttttcttgtgtgacacatagaattgacatttaataactctagatctaatttgtaccttagtgagagacattaattattgcttctgtttaattgtttatgagaatttttgtaatgtttggtgtgttttgcagcaatcattaaaagatggcagatggtgaggatatacaacctcttgtttgtgataatggaactggaatggtcaaggtatgtatatggattcatttgtgtgttgctttgtttgttgatcttataggttttggttttggagaaaacttatatgcaattccataaatgcttttagtgttgttttctaattgaaattggagttttacctcaataatccgtgttagcattcaatggaaacctttattatatggattaccgaggtgaaattctaattctgattggagaacaacacctaaaacagaatggaactgtatctaagttgtcctttggtttttgatgatttttctctttcggtgttgatttgtgttcaattttgcaggctggatttgctggagatgatgctccaagggctgtgttccctagcattgtgggtcgtccacgccacactggtgtgatggttggaatggggcaaaaggacgcatatgttggtgatgaggctcaatccaagaggggtattttaacactgaaatacccaattgagcatggcatagttaacaactgggatgacatggagaagatctggcatcacactttctataacgagctgcgtgtggccccggaagagcaccctgttctcctcacagaagcaccacttaatcccaaggccaaccgtgagaaaatgacacagattatgtttgagaccttcaacactccggctatgtatgttgccatccaagcagtgctttccctttatgctagtggccgtacaactggtaaagattcttcaatgtctgttttttccttttcttggtttctggtaatttggggcatggtgcatggtacttgtgtatttgttgctgtcacgccacttgtatttcattagaatctcaagatgattttcaaatgaatatagtttaaatgtccatatgaaattgtgtactaaccaattgaatttcattcttttatttgtaaacattttgtgggagttaataatgtcgtacactctgttcatttcattattagtgcatattttcataaaattgtgagactgtgagatctaagggactttcaatacatatttaaatggattttgatgcatggatcatggtctttgttgatgtcatgccacttgtatttaattagaatttcaagatgattttctaatgagtgtagttgaaatgtccatatgaaattgtatatactaatcaatcacgttttttgggaattagtaatgtcatacattctgttcatttcaacaataatgcagattttcaagaatagggtgagaatgagttgaaaacgtgggttttaactttttggtgctttcatataggtattgttctggactctggtgatggtgtcagccacacagttccaatctatgaaggctatgcactgccacatgcaatcctgcgtttggaccttgcagggcgtgacctcaccgatgccctcatgaagatcttaaccgagcgtggctactctttcaccaccactgccgagagagaaattgtgagagatgttaaggaaaagttagcctacattgctcttgactacgagcaagaggtggaaacagcaaagacaagctcagctgtggagaagagctatgagctacctgatggacaggtgatcactatcggtgcggaacggttccgttgccctgaagtgctcttccagccatccatgattgggatggagtctcctggcatccatgagaccacatacaactccatcatgaagtgtgatgttgacatcaggaaggacctctatggcaacattgtgttgagtggtggctcaacaatgttccctggcattgctgataggatgagcaaggagatcacagcattggcaccaagtagcatgaaaattaaggtggtggctccaccagagaggaagtacagtgtctggattggaggctccattttggcatccctcagcaccttccaacaggtacagcacttggcttcaataacatatgaatgaaatttgaggggttctgtgaatagatgattctggaaagtggaaattaatcagggaattctatttgaagaatatgtagagaccaataaaattaaggaaaaagaaaaggaggagggaataaccaacataatattcagttaataaagggaaaggaaactggtttaaattaaaatagatgtgatcgtgtgaaacaaatgtagtttgtagagacttatagtttatggtaattgtacaactttttttagcttcccttcttaaaagaagaagcttctctaattaagttttgtgaaagctccttttggtttcttcactaaaaatttacttttattttctagggtctttttgaaattatgtgtattgttcaacttctctcctttttaagaaaaggaccaaaaacttgtgcaaacactatcttagtactgatctgatcctattttctgataacacttaaatgtattcctgataaattttttctttcttgagagcagatgtggattgcaaaggcagaatatgatgaatcaggcccctcaatcgtccacaggaaatgcttctaatgatgcagagagtccaggaaattttaatatatactccgcactacagaaataccataaagtggttgaggaagttttattttctattctttaccattttttaaccatgttttcgtgtttcctttattaatatgttgggataagagcatgaaagcaaagcatgatatataagattttttttttttcattttattgtagaagagatgtgtattgttattgatttgatttggttgaatcaaattctcttaagcattttgattagaatagtggtatgtattttgatttattgttctgtgaacgaagagtcattcttgttcagtgttcacggaccaatcttttatataatatacttcatatttggcc

SEQ ID NO: 31 - DNA, 2869 bp, Glycine max; identical to SEQ ID NO: 18
  source 1..2869: mol_type = genomic DNA

SEQ ID NO: 32 - DNA, 2928 bp, Glycine max
  source 1..2928: mol_type = genomic DNA
aagtcgaaagttaatttgcatttgagtttcatttcactctcatttagttctcttcaatgaatataaaagcttccttcttcagtgaagctctttcgcgaaacactcccctttgccgctgttgttgttgctgcaccaccgaacaacttcccctgtaaatcgcgtttcgtttgtgcaaggtgcgtttcaatcaccaattctgtgatttgtgcttttcacctgatattttggatgaatttttgtgcttacatgctgtttttggttactggatccgtaaacttctgttgtgttttctggatcgaaattcttttgacttcgtttgctcttgctgatgtggatctacttcgtagctgcatcttgtgtgtttaggtttcggttgttgcttaattttgtggtgagatgttttctgatgcatcggttttgattttcggcttgtttttatgcgatttatagatgatcaaattggaagatgacattcttgcttagcttgttaattatgtgtgtatcttttatttttatttacgagtcttgtggatatgttctgctatgcatgcttccgatctttcgagtgtgtaaaaatctttttattgcaattgcatgaaaatgatggtattactcgttccttttcttgattgaacgaaaagtgaaataattgtgagtagtagttgatgtagttttgcataactgagtgatagtgaaaaaaaaaaggcctctctagaattttaagcttttaattgttgcatcatattttctttggtttcgttcttttttatttcctaaacaacttctttcccgttctctgctacaggttttaaaagatggctgatgctgaggacattcaacctcttgttgttgataatggaactggaatggtcaaggttagaagatgttttgccaattgatgagtgtttcttgtgccattgaagaagactgttcactctgtgcttgcttagtattcattgttaaatatgatattgatatatatatttttctcgatgtttgcaggctggttttgcaggtgatgatgctcctagggccgtgttccccagcattattgggagaccacgccatactggtgtaatggttgggatgggtcagaaggatgcttacgtgggtgatgaagcccaatcaaaaaggggtatactcaccttgaagtatcctatagagcatggcatagtcagcaactgggacgatatggagaagatttggcatcacacattttacaatgagctacgtgttgcccctgaagaacaccccgtacttcttaccgaggcaccactcaatcccaaggccaacagagagaagatgacccaaattatgtttgagactttcaatgtgcctgccatgtatgttgcaattcaggctgtcttgtctctgtatgccagtggacgtactacaggtttgtttctgtgattgatcttggatttactatttactataccgtggacatgtgatttcaattggattaggtcagcttattatctgagcaaattcctgtaagttggctgagttctgatttgatattaggcagtattcaattttgtttatacagcaggcttaattccacacgtacaagagtgggatatacatgcatttctacattaattatgaccagcattatttccttattggtttgtcttgttatgttggtattaaacaggtattgtgcttgattctggtgatggtgtgagccacacggtgcccatatatgaagggtatgctcttcctcatgcaattcttcggttggaccttgctggccgtgatttaacagagtacttggtgaaaatccttaccgagagaggatactccttcagcacctctgccgaaaaggaaattgtccgtgatgtgaaggagaaattggcatacgtggcccttgattttgaacaagaaatggagactactaagagtagttctgcagtggaaaagagctatgaattgcctgatggacaggtcattacaataggttctgagagattccgttgcccagaagtactgttccagccttctctgattggtatggaagctactggaattcatgaaacgacatacaattccatcatgaaatgtgatgttgatattaggaaggatctgtatggaaacatcgtgcttagtggagggtctactatgtttccgggaattgctgatcgcatgagcaaggaaattagtgctcttgcacccagtagcatgaaaatcaaggtggttgcacctcctgagagaaagtacagtgtctggattggtggttctatcttggcatcacttagcaccttccaacaggtttgtactgatgtttttttcctgctattctcaacatccccccctcatttgttcttacaagtaaaatgtattagtttatggaaggcaggtattgagtgtgtactttgttctcttatatgtagatgtggatctccaagggtgaatatgatgaatctgggccagccatcgttcatcggaagtgcttctaaagttgggtcaagtcgagctggatggtgatcaagttcttcatgcacccagtcctgtgccatatttcagtaaagtttggttgacttatttggtatttgaagctttgggtttttaatagatatatctagtttaatgaatggatttgtaagttgagtatgttataagtttctccgttaggtcaccttggaagccagactttttatgcaattggcggatggtattggaactttgtaggttctgcttggtttggtttttccttttattcgattttcatgttgtggccaagaattaggtgcctcgagttaggaggacgatagtctaagcatcttttctcacagggatttttgagtcagtttctgtttatatttattatatgcataattggtttttatgtttgcagtacactcagaaatcagaatgtttttattgtttgaggtgattaatcgtttatacaccatatgattaaattta

SEQ ID NO: 33 - DNA, 2953 bp, Glycine max
  source 1..2953: mol_type = genomic DNA
tttccatttgctgcttgatgtcctaaagagaccacttttcttttctttccaacattctccactacagtctcgttacgggatatagatttatccggaatcaaacgcaccctaaacggtgttgtctaagttgaaagttcatttgcatttgagtttcatttcactctcatttagctctcctcatcgaatataaaaaggcttccttcttcgctgacgctctttcgcgaaacactccccttgctgcggttgctccatcacctaatcacttccccacttcccctgtaaatcacgtttagttcgcacaaggtgtgttttgttcaccgattctgcgatttgcgttttcgtctgatgaatttttgtgtttacatggcgtttttggttactggatccgtaaacttttgttgtgctttatggatcgaaattcttttgacttcgtttggtcttgctgatgtggatctacttcgtacctgcatcttgtgtgtgtaggttttggttttagcttaattttgtgatgagatgttttctgatgcatcggtttttattttcggcttgtttttatccgatcaagttggaagatgatattcttgcttagcttattaattttatgtgtgtgcctttttttttacgagtcttgtggatatgttctgctatgcatgctttcaggatctttcgagtgtgttaaaagattttcattgcaattgcatggaaatgatggtattacttgtttcttttcttgattgaacgaaaagtgaaatcattgtgagtagtagttgatgaatttttgcataattgagtgatagtgaaaaaaggcctctctagtagtttcaaacttttgatcgttgcttcatcttttctttggttttgttttttatttcctttcctgaacaacttatctcccgttctctgctacaggttttaaaaaatggctgatgctgaggacattcaacctcttgttgttgataatggaactggaatggtcaaggttagaacatgttttttccaattgatgagtgcttcttgtgctattgaagtagacagttcgctctgtgcttgcttaaatatgatattaatatatattttttctccaatgtttgcaggcgggttttgcaggtgatgacgctcctagggccgtgttccccagtattattgggcgaccacgccataccggtgtaatggttgggatgggtcagaaggatgcttacgtgggtgatgaagctcaatcaaaaaggggtatactcaccttgaagtatcctatagagcatggcatagtcagcaactgggatgatatggagaagatttggcatcacacattttacaatgagcttcgtgttgcccctgaagaacaccctgtacttcttaccgaggcacccctcaatcccaaggccaacagagagaagatgacccaaattatgtttgagactttcaatgtgcctgccatgtatgttgcaattcaggctgtcttgtctctgtatgccagtggaagaactacaggtttgtttctgtgattgatcttggatttaccaattttactatactgtggtcatgtgatttcaattggattgggccagttatttgaataaatgctgtatgttgactgagttctggtttgatttgaggcagtgttcaaggttatatgtggcacatatacatgagtgggatatacatgtatttccacattaattcctcacgaccagtattatttccttattttcttgtctttgttatgttggcattaaacaggtattgtgcttgattctggtgatggtgtgagccacacagttcccatatatgaagggtatgctcttcctcatgcaattcttcggttggaccttgctggccgtgatttaacggagtacttggtgaaaatccttactgagagaggatactccttcagcacctctgctgaaaaggaaattgtccgtgatgtgaaggagaaattggcatatgtggcccttgattttgaacaagaaatggagactactaagagtagttctgcagtggaaaagagctatgaattgcctgacggacaggtcattacaataggttctgagagattccgttgcccagaagtactgttccagccttctctaattggtatggaagctactggaattcatgaaacgacgtacaactccatcatgaaatgtgatgttgatattagaaaggatctgtatggaaacatcgtgcttagtggagggtctactatgtttccgggaattgctgatcgtatgagcaaggaaattggtgctcttgcacccagcagcatgaaaatcaaggtggttgcacctcctgagagaaagtacagtgtctggattggtggctctatcttggcatcacttagcaccttccaacaggtttgtactgatgttttttccccctcctattctcaacatcccccctcccacctcccccctttatgtgtacttacaagtaaaatgtattagtttatggaaagcattgagtgtttactttgttctcttatatgcagatgtggatctctaagggcgaatatgatgaatctgggccagctatcgttcatcggaagtgcttctaagttgggtcaagagctggatggtgatcaagttcttcatgcacccagtcctgtgccatatttcagtcaagtttggttgacttatttgatatttgaagctttgggtttttaatagatatatctagtttaatgaatggatttgtaagttgagtatgttataagtttctccgttaggtccccttggaagccagacttttttatgcaattggcggatggtattggaactttgtaggttctgattggtttgatttttttccttttattcgattttcttgttgtggccaagaattaggtgcctcgagttaggagaacgatagtctagtatcttttctcccagagggatttttgagtcagtttctgtttatatttattatatgcttaattggtttttatgtttgcattaaa

SEQ ID NO: 34 - DNA, 3448 bp, Glycine max
  source 1..3448: mol_type = genomic DNA
ggtggagggtgaaaagccgaatttaaaaaaacgcaagttcacagagcgcgttacttccgttcacttttgaacccaaagagcgggtagctgagatcggagaaccctctctttcttctccttcttcaggtcactctctctctcctcttctttttgttcctcgtttcgattgcgccttgccgtttatctcgcattatgctgtttgttgtctgcttcactgtttctgatgatagttattgttgatttttctgatttgtatgttcttcatgacacgagtttttcgttgaatttatgcaatcggtaatatgattatggaaccagtggtttttgtttgcattgtttaatgttatgccgcgtaacttacattacctgtttgaaaatattgaaatctgaaaatgtcaagaacgattgtccctttcgtgtctgatcgtgtttaggtaaaatcttgttataatcagataaaaaaatgagctgctgaagcttcctgttcaatccaaccgaatcagtgccgacaagggttttaacctgcgattcttgatattgcagaaaattgtgaacaagttccagctgcattcgcggttgcgatgtcaagaatgcacttcgttttttaaaatcttgaatgtgatataacgatataagaagtactataactatactttttatcgaatataatggaatatattatactattttataaagaatttaattatgatccgcagctaatgtaaatatcttctgtgttaataggttatgtatcaagtttaacgtatttatcataaacttatacagtatcatcgaattctaattaaattgaatatgaaaagaaattaaattttatcaaaagtatagtaataaacaaatggttttagttttgaatgagtataaagagatttaaaatacaatgcttattcataaccgttagtgttaaattcattgttacacttgtggtctggtctgatatgaacaacaatgatttagatttgtgtttatagcttttcggattgaaattttgcatgacgtgaaaatttagtgtttagttgtcttttaatagatttttccaaatttttagtgttccatcatattgagatcttctgtactttcattttcaactacacaaatcctaatctttcaaaggatttgtttttctatcaaattgaagtatggaagttatttttgaaacttatcagtcagatttagaactgcacctcatgaagttcaattatcaacttaagtagatcgaattcctgttctatgtaaggtgtgaataggttctagagagataaatataaattattttcacattcagcgaagtgcagatatcaaggaagagaatgatacccgtgatttagacctttaggttatatcctaaattctgcaaacgttttgttgtagtcagcatcactctagtagatgttgcatttgtttagactctgcatgtgaaatactgaaatggctttgttctcaatgaactgagcgattttttatttattttttattttttcagcagttgaaaataaaaaatggcagatggtgaggatattcaaccactcgtctgcgataatgggacaggaatggtgaaagtaagatatctggatggttttattttcaatatttttgtttcctgcagtgattgaccagtacttttcaatttctattgatttactgagtctactgtattgcaatgtttaggctggatttgctggggatgatgctccgagggctgtgtttcccagcattgttggtcgtccccgtcacacgggagtgatggttggcatgggccaaaaagatgcatatgttggggatgaagctcagtccaagagaggtatattaactctcaaatatcccattgagcatggtattgtgagtaactgggatgacatggagaagatctggcatcacaccttctacaatgaactccgtgtcgctcctgaggagcacccagttctgctaaccgaagcacctctcaacccaaaggctaatcgtgagaaaatgacccaaattatgtttgagaccttcaatacccctgcaatgtatgttgccatccaggctgttctatccttgtatgccagtggccgcacaactggttagtcattacttctttcaagaaaattattctgttccatctaagctacactcttaaattgttaagctggttaattttaaacatgcaatgctctgtggagtctcttcttgtttttcccatgtgacaatatcatacttaagttgtggttgaaaactctatatcttcctaatctaactagaagtagtagagctgatttctctgaggttgtctaacttgtcttgtttccttcatgcttgttgaattaatttgtgcaggtatcgttctagactctggagatggtgtcagccatactgtccccatttacgaggggtatgctctccctcatgccatcctccgtcttgacttagcaggacgtgatctcactgatgccttgatgaaaatccttacagaacgtggttattccttcactaccacagctgagcgtgaaattgtaagggatgtaaaggaaaagctggcttatattgcccttgattacgagcaagagcttgaaacatcaaaaactagctctgctgttgagaagagctatgagttgccggatggacaggtcatcaccattggtgctgagcgtttcagatgtcctgaagttctcttccaaccatccatgatcggaatggaagcttctggcattcatgagaccacttacaattcaatcatgaagtgtgatgtcgacattaggaaggacttgtatggaaacattgttctcagtggtggatctaccatgttcccaggtatcgctgacagaatgagcaaggaaatctcagctttggccccaagcagcatgaagattaaggtggttgctccacctgagagaaagtacagtgtctggattggtggctctatcttggcttctctcagcactttccaacaggtaaacactttgctatgattctaatgcatgaatttaatttctttaaattgatcaaatcaactgtagatacatccttactttctcactgtacactttagaaggattaaaacctgatgataattgtatgaccgagagattatgcatgtgcttttcttccttttagttctagtttcggttccctgatcaaatatcccagtaagttaaatataatgccagtagcataataggacatcatgtttgaaatgcagatgtggattgcaaaggctgagtatgatgaggctggtccttcaattgtacacaggaaatgcttctgaatgttgcaaggtggcttggtgaaagaaaatacggtgtcctcgttttatatgataaaaatgtgttgttaaatcagttgactgaattgatgacagtaaattctttcatttgtttttgttctattattggcaattgttcaacagatcttctttagttatgactataaatcaacgcctttcaacttaaaa

SEQ ID NO: 35 - DNA, 5773 bp, Glycine max
  source 1..5773: mol_type = genomic DNA
atgaaggggtcgaacccagcgtgcgaagtgaaggtgaagcttgtgaaggaagagggtgaactgcagataatggtgacgttcattaacagcgttgaggaagtgattgatgcgacaacgatgccgactcaacatacaaaaacttgattctagaaaaagttcagcacctcgagacggagcaaatgttctgcgaagcaagggaaccctagcctgttgtcacccctgacgaggagctctcgcaaattgcatcccctaccaaagtgcgtttccattttctctctttcaattttatttgtttggcttgtaatatttaagcatgtgattaggctttcaaatacaagcgtcaattccttaagcatgtgattaggagtttgagccataaggctctatgtatggaagaacatttgtttagagaatcgatccgttaaatagatctctttaccttgaaagattagaattttactcttgagtggtggataacttggacacactaaaaagatggtggataccctggacacactagtgaattaaatttaagtttgtgtgattttgaagatggaagagtagtaatgatttaaaaaggcgtagttcgcaaaattgttcttagctttgttagttctagttataggtgtgtgtgcatcataagttgcagtggagaattttttggattcatgacattataaccaaagttcatggctattagaaagttgtgaataatacatgtgtgttgtgtgactataaggctatgacattataatttcggtctggggaaaattaagcaataaacaactaaggttttggtttttcatttttttttagtttttttatttttcaaattttctttgtattgtttgaggactttggttgacaaagtattaagtaggttgaagttgtaattgttgaaatggtctctgcatggtctattttgtcacttgtgtggcatgttgaatttctaacaatttttttaggagttatattgattttgttagcatgtaaatttttcattcaatatatataattttgaattttttaatatatatcgggttaaatcggattaactactaactcaccggttaaaccactgattcactatctagaccgaatcaatgaccgaaccaaatttcataactttgttgtctgatatagaaatggaagagcaacatttctccactatgggtgaattgttcaactaacctaatccccatcaacttttgcctgaaatctagttgttcatcaaatataagttgggtgcttgggttcagcaatagagcattagactctttcttaataatgtataactaatgttttatatcattttattatattaagtattttagtctattttaggaatattaaatattataattaaaggtttacttcatttttattcctaaactattttggatttttgtgcttttagtctctagtttaaattttaatcttctaaaggcctttaatttttttcctttaatttcttcatttaagtaacaatattaacaaatgatgtaaaaataatgttgatagtccaataactttttaagtcatcaaaaaatttaataagatagtcatatataattttttgataaataatttgccattaattcaacattttcaattagtatgattaaaaacacattctgtccaaaaagtaaaatgtgactgtacttcctacttaaatgtaaggaccaaaagtagtaggggtgggaataggtcaggccggtctataggggcctacgacctagcctacataagcctgacctgaattggcctatttaattaaaaggttagactcagacttttttaaaagcctattaaattaaatagaccagacttaggcttattaaaaagccttataagtcttataggtcggcctatatatatatatatatacttatattattttttgggtacaattaatttttttttgaaactattagacttggttacacattattgctccataacttgtagacgaaggatcaagctgaatgttttgatgatgccaaaggttcacatgtgtctcaaagctttattcaagacagagaaattaaagatattcaagatgaatgatcaagacaagtctctagtcttagaaagggtatattaaataggaggggaattccaattgaagtagcaaaaggtttgaccaagaaatttaagttaaaaagtcttttacaataaatttactctctggtaatcgattaccagaggatgtaatcgattaccagtgaccaaaactgatttacaacagctattaaaatttgaattcaaaatttgcactgtgtaatcgattaccagcagtttctgaacattttaattcaaattttaaagcgtgtaatcgattacacacatactgtaatcgattaccagaggagattttcagaaaacattttcaacagtcacatctttttgtgtggttcttgaatggctatcaaaggcctatatatatgtgacttgagatacgaatttgacaagagttttgaagaacaaaaaggtcttatcctcttaacaagcaaaattgttttatcctcttacaaatttcttggccaaaacacttgtgattcaataaggaattaattgagtgctcaaattgtttaatctatttctttcaagagagatttcttcttttcttcttcttcattctgaaaagggattaggagaccgagggtctcttgttgtgaaagaattctaaacacaaaggaaggattgtccttgtgtgtttagaacttgtaaaaggaatttacaagatagtggaactctcaagcgggttgcttggggactggacgtaggcacaagggtgtggctgaaccagtataaatctgagtttgcactttctcttcccttaaactcctttatttattattgttttatattcatattcaaattgttctatttgaatcaacatttaagaaattcattattaagggaatttataacttgaatagaaagttaaatagaatttttaattgtgaaaataatttgtaatatcttaattcaacccccccttcttaagatatctgaggccacttgtccaacataacttctattcctataatcaagtaagactttaattacaatttatgtgtgagtcatgtgcccttttatatttcttattgtttttattggcttttcttttcctttaactttcctattacgttcctactccagagcaaaggagtattaaatatttaatgtaaagaaaacttttaaaaaggttatcaggtcaaactaagcttttaaaaagaccagatcgaaccaaaataaaagcctttgataggctagactcaggcctcaaaaatcaatcgtagactaggctcaggtctttcaaagtctggtctgacctattttcacccctaaaaagtagtaacaaaaaatatgttgagaaaaagttcaagaattttaaggggtcaaaatttatattaaagactaaagacataaattcaaaaaaaatcatggataaaaaataataaaccttataatctttaataactatttttgcttttaatttattaatttttcttaaaaataatttagaaaaagtcaaattataacttattaagtaagtatataatattaactaatcttattaataaatgatagtaatttttaggttaaatttgtaattttgttcctatgatggagttactcatgaccttttatttaaggataatgaaataaatttttattttctttagttaattatataaacactattttatatgtataactggttaagagttattattttatttttaaattataaaaatttataaattaaaaatatttaaaatataaatctttttaattttattttatatcattttatatgtttttaaaattataataaaataagaaaaaatttatatataataattattaatttatattaaaatacatttttataatataaattaaatacatgtaaagttaaatattatattaaatacatgtaaagttaaatattaaatatattattttaatttataaatttttattattccaaaaaattaataacttttgattaatgatacatgtaaaatagtattcataaaattaactaaataaattaagtgtcttagtgatttataaaattaatcattttttttatttttttcactttatttaatctcttatcacctaagtataatatcagtgacctgcataagtgtaacattatgtcagcgtcaatacattaacacgtcatatatattttactttgaatggtcaactggtaagatgaaataaaaaaattaaataacttgatttaaaaataggatcatcaaaattatggatttaaaattagaacaaactaaaattagaattttgcctaatttttatttatgaaataacttgatattaaatacttgattttcttgttaaaagaatattcatttttattttatagaaaatcttcgttccgaaatatagcgcactggattgcacaccttaaaccttttgagttttttttgagtgaataggcattttggtccgtgtctttatacccattttgcaaattagtatatatctttttgaaatgtaaaaaaatagtctctatctttacataagtgttgcaaaatagtccttgccattagtgccacgactatctcatttatgctttctcgtactccttttgtgccaactcatatgcaacttttatatgctccgaggaagattctcttgccccgtcctccgtaaagaaaccttggttccttgcctgggacatttgaatctccgctattaaacaaagccaaagcagtcatctcttgaaatttatccgcagcacaaaaattcatccaaacaaatcagacgaaaatgcaaatcgcagaatcggtgaacgaaacgcaccttgcgcgaacgaaacgcaattttataggggaagtgattaggttgtggagcaacggcaacaaggagagtgtttcgtgaaagagcatcagtgaagaaggaagctttttatattcaatgaagagagctaaatgagagtgaaatgaaactcaaatgcaaatgaactttcgacttggacaacgccgtttagggtgcgtttggtttcgggataaacctatcccacgcaatgcgagactattgtggaaaatgttgggaaagaaaagaaattaaatggtctctttcggacatcaaacaacgaacatagagaaaatgacccaaattatgtttgagactttcaatgtgcctatcatatatgttgcaattcaggttgtcttgtctctgtatgccagtggacgaactacaggtttgtttttgtgattgatcttggatttaccatttttactatactgtggtcatgtgatttcaattggattgggtcagcttattatttgaataaatgttatatgttggctgagttctggtttgatttgagacagtgttcaaggttatatgtggcacatatacatgagtgggatatacatgtatttccacattaattcttaacgatcggtattatttccttattttcttgtctttgttatgttgacattaaacaagttttgtgcttgattttggtgatggtgtgagccacacggttccaatatatgaagggtatgttcttcctcgtgcaattcttcggttggaccttgctggccgtgatttaacagagtacttggtgaaaatccttactgagagaggatactcctttagcacctctgccgaaaaggaaattgttcgtgatatgaaggagaaattggcatatgtggcctatgaagcaccgacaccgacacggacatcggacacgacacggacacagacacgtggacacctgtaa

SEQ ID NO: 36 - DNA, 20103 bp, Glycine max
  source 1..20103: mol_type = genomic DNA
cttgactagtagatgcaccaagaagtaatagaccccaccaccgaccccttgccgcatttgtacggcactccggcagaagccatagtttaataaaaaggcagcaaaaagcacgcactgtaaccgctcctccacctgaagagtgaagaccaaacccaccatggacagcagaaacgtcgtcgtttgcgacaacggaaccggcgtacttctcatctctctctctctctctcacacacacacacacacacacacccctttgcattgcaacggatcttgcaaaatccgtcaaattagtacatcctttacttccccggatccgaacggtgttatatttttgatgttgtaatatttattcttattatttgtgaattgtgaatgcagtatgtgaagtgtggttttgctggggagaatttccccacatcggtttttccctgtgtggtgggaaggccaatgctccgttacgaagaatcgctcaccgagcaagcgcttaaggtatatcccaaacccaataattcactattaaaccatattataagaagtggttgttattattgtgattattattattattgtgactttgattatgatatgaacttagattggttctttgtgttgtgttgtgttgtgtttaggatattgttgttggtgaagggtgtgcagacttgcggcatcagcttgatatatcttatcctgtgaacaatggcattgtgcaaaactgggatgatatgtgtcatgtttgggatcacgcgtttttcaatgaattgaaggtgactttctgaatgttctttcaagtgttgctttgtcagttggtaaaatggttattttttgacaggttaatccaccagactgtaagattttactcactgatccgcctcttaatccttccaagaatcgcgaaaaaatggtttgtttactgattctgttgcctttgttttagcaaataaaagagctaatatatcctatattagttattgaatttagttagaatgcattcataatgtaaagttttttacattgtgatctaatcatagattgccatataggttaagattgttgacttttgtaataattactttaaaaatcatatataaggtgatttccgtttagttgatagtatagaagtttttataatgatggtgtgtgaaaattaaactcttaattactttaaatattattgttttatgtgatttggcttcacaggttgagacaatgtttgagaagtacaattttgctggagtgtttatccaaattcaagctgttctaacattatatgctcaaggtgcttatagagatgagtgaaggttgatgttttgtttttctttataatctcaccctgattgtaatttactccccataactcttattacccatttttggaaatactgactctaattataacatgtagttgtttataaactgtagttttatactctgttatagtcttacacaacatatctggtcaaattacgtgtcataatttgcaaagatttgtttgtaaaatagggagtttcgctttgtgccttctatcaacttgcactttaacatttctttacttgtctcaggtttgctgactggattagttattgactcaggcgatggtgtcactcatgtggtaattaattagcttctgtgccacttaattattatgctgaccactataataacactaggttttatctttttttttttaaatctctgtttttgatttctttgaatgacatttggtacagtcaatatttacttcatgtcagttgtatataacaacacttagatgaattgggtaatgtaactaaatcaaacatttgacaatgtcacatatctttctaaatattttatgttattcttaacaagtaatcaaatattgatacagaaatactatgttgtgcggcaatctatattggaaagttggtaatggatgagcttgctggattctaaactgttggatgctcattagttaactatcacccttgcattttatgtgaatttcatattttccttctttcagttcggtgcatgaacatcatcattagtttgtttagcattgttcatatttaaggattggattgctaatttatttgttatcaatattatagcagtgttttactgtaatgttgtgtgtcaatgtagatcacacctcatgctatttataatatggaaaaggaaatcaacattgattacaagatcaatcaattactgattaattactcccctcaagctggagcatatgtgagatatgaaccaagcttgttacaaatgtggtaaacccgatagaaactaaaggtagttcgagttgtgtggttgggccagataaacatggctcggtggcagccaacgaaggctcgcaatgacgatggagaccaatgtgacgctcgccggatatggtcacgcattgtgtgcgtgaacttcatgcgctcgggccctgcgtgaggctgcgtgcagtggtgtttttgagttggctgcacatgtggacgacatggtggtctttggcgatgacgacgggtactgctcacccgtgaaaaagcagaaaggtccgctggggacaccttgaggcagagggagagaagataagtgtgatgctggctggagatgtgtcatgcgtcgtgtgcatgaacttcacgcgccagggccctgcctggggtcgtggcggtggtgttttagttggcagcgcacatggatgatgagacgatctgcggagaggttgctgaaaaaggttaaacaggttgctggaaagagacgaagcacgatagttcggtcgctggattgtggatcagccaaacaacgacaaaacagaggcaaataacagccaaatgggcccaaacaaaggccaaacaggttcgtcaaaggagaaggaggatggtgaggaggtcatcggagaaagggttgtgcaaaaacaatgccacgtgccagaaaggggatcgcgggtgagcgtcacgcgctgagcgtggcagtgtgtgcagcggtagaagtggtcatggtcgacggtgttggattcgctggagagaagggcttctaatcggagggtcacaccggcgagatggcagcgctgtgatagtgtaagggtgctcgcagtgtgtgtgctactgttcacatgaaaggaatgctgtggcgaaaaggggaaaaattgttggaaagagggacgttagcagagaggtccactggaatgcagaaacagtcaccgcaagacgtagacaagcagaaaaccattggggaccaagtggaaacaggtcgtcggaaggcgaacaaagcagagaggtccaccgggatgtggaaataggtcgctgaaataggactactagtagagaggtccatcgaggacctactgtccttggtggagaacaactttcgttattcctctgtcaagaataacctaagctttgataccatataacagtgttttattgtaatgttgtgtgtcaatgtagaacatacctcatgctatttttaatatggaaaagggaatcaatatcgattacaagatcaatccattactgattaataggaaatagaatattctaataataatataatatcaggaataatatcaaaacataatctctcaaatgtattatatataattttataaaaatgatttgttcgatgaaagctttaaattccatggtggatttgtgagcttgtacattaacatttaaataatttttaaagagtgttaaacttacttttacactggtgttagttgatttgaattctaaatatatgtatattggtgttataacaatcaacttgtcggcacaaattagaaatagtgttacaattcctctgtcacccgcaatgccttcattgttgatattaacccaacttccttcagtctgaatgcataatgtttcttttttctttcatgtatatgggtcagcagctatcagtataccaagtgtctaagccatacactagtctgaaagtgaaatgttgtgacttgtgattctttatttccatttattgagaatggggacccctctattatatttccttttttctgaatgtttatgaagcataatttatgaatgaaacactaactgttcgccaatcacgcacacaagtgttatgttgtacaacccatggtttaagagagcaaaaggtggttaacaagttcagtatgttggcattacagtgttacctaattattatttaaagtatacattccaaagctgttaataatgaaagtttttttttccaggttccagttgttgatggctattctttccctcatctaactaaacgaatgaatgttgctggtcgacatataacctcctatcttgttgatttgctttcaaggagggggtaggggctaactcctttcatttcagttgtaatatcttatgtctgcttcaattctaactggaacataattttctttccttaaggtatgcattaaataggactgctgattttgagactgtcagggaaatcaaagagaagctatgctatattaggttggcttcaaatctcaagccacctttgatttcctgtgtcctttaatctttccttaacaggtacaactattttcctgcagttatgactacaagagggaatatcagttggggcttgagaccactatccttgttaagaattatactgtaagttgatatcctggatttcttgaaatctttatgtgactagttccgtgtaaataattattgatttagttggcaattctggttaaaatggcttgcctgaagatagagggacaggagactcatgttttgctgttcctttaatctgttctttgatgtatttcttttcatatgcttttcaagactttctgtaactacattcatatttcttgtgccataacgcatgcatgtaatatataggatttattattttattactattgttgttgtccactcactagtagtgcatttggtttaaaggatggaaggagagggttcccttgtttggtttggtccaagagaagtggaggggagggaaaatatgagtaatatattgttaacccttataagcattagtgaaggggatggggggtaaaataaaatcttatcataattcagtcagcatagtaaaaaaattataaaccacttcccctccccttcaaatccccctaatattggaagggaggaaaaaatagaagaggagagatatggcctcctcattccccgttcctcgcttcttaatttctgaactaaacgaggtaggatttaaaaaatctctcccctcccttccaaatttcacgtatgcataaggtaattatcattaatattgttagaatatatgaaaaatatctaatattattcttttctcagaatcttagattatcctttaggattaatttccctttatcctcattatctcttagaattggttaccatattttcttatctcattatttgtttcctacatagttaggatcatgattagtacaattaagggttagtgctctaggttttatgaccacatcatcacatcatatcaactcaatatcaatctgataatagtctttccttttcttccctttatacatattgatttacccctctgaatcagcttccagatggaagggtcattaaagtaggcactgaaaggttccaggctcccgaggctcttttcactccggtaggtatttggtgcccatttgacttatgttttctattgttaaagtcacatatagatatattctttattttctgtctctttaattgacaactcttcaaagttcaaaattcaaatcctatcagaatcattatggcaattttttttaaacatagctaaagtattttcatgatgtgcttgtgcaattctagcaagtgtataagtgtatattagagtatgataaggagctgcagttattcaactgcagtctcatctagcttctagtagaagttagttagttattagtagttagttagtcagtcaattctgttaacagaattgactatatatactctttgtaaatctgaaattacttgggttagtaaatgatattttacttcttcatttctcctttctctctctctctctctctttctctctcagactagaaactttatgatggtatccagagcttagttgatcatcaatgatgacaaactctatctcttcttcttccacttccgcttttccaaatttgatctcacagaagcttgatgatttggatttcttactatggcgacagaaaattgaacttgtcatcaagtcacacgaacgtcaaaggttcatcgcgaatcagcaaattcccttatgattccttactgaagtggatcgtgatgcaggagttgagaatcctgcatacgaggcgtgggaacagcaagaccaggttcttcttgcctggttgcaatcgactctgtccacgtcgttcctatctcggatcattggatgcgtccattcctatgaggtttgggaatggatccatgattatttccacaaacagatgcaagccagagcaaggcaacttcgaactgagttgcttgcaatgatccttgaagataagtccatgtgcgagtttctgctcaggatcaaagcaatttccgatgcacttgtgttacgaaccagaaacagagaactaaatgtaacagtgaaaaaaaaagaagatcacagggctttattgattgtaataaaaagatgaagacaattacagaaagtggaataacaattcctggatttctgactcagagctaggccccgtttaggaagttaacacttcctaaccattctagtgacttaatacaatccaagataaattcccattccctttcctactccttatataacagaactactcaactaggccctcactccaagaccacgtcactcccataactaactagccactaattcccttcttgccccttctagaatacacctgccatatcctaggcttatttgtctcattatgaatcagctgctcacgtggcaatgctgcctgggacctatcaatactcccctcttcagctgcaatcttgtcctcaagattgaatttagggaactgacttttcatcatgattgcttcttcccatgtggcttcttcagcagtttttcccttccattgaatcagtacttgcttgctctcctctccctgttgtcgtactttcctagtggccaaaacagctgcaggttcatactcttccatctgatcttcctccagcagttcaggtaattcctcctcttcctgataatttcccactgccttcttaagtagagacacatggaacaccgggtgtactctggaccctacaggtagcttcaacttataggcaacagcaccaatcctttctaaaatagggtaaggcccataataccttgctgacaatttggcattaatccttgtcaccactgatttctgcctatgcgctctgagcttaacaaacacccactcccccacagcaaagctcttgtccagcctcttcttgtctgcttggttcttcatcctttcttgtgcctttagcagttggttttcaattgtctcagagcctcatctctgtcaatcaattctctttgcactgcctctactcttgtctctccttgtaaccatcttgtcaacttaggtggcggcctcccatacacaatctcaaatggagtcttctcagtagcagcatggtaattagtgttgaaccaatattcagcccaatgcacccatgatacccatgttttgggctgatcagcaatgaagcaccgtaaataggtctccaagcacctattcaccacctctgtctgcccatcagattctggatgatatgctgaactcatcttcaactgtgttccctgcatcctaaacaactctctccagaaactgctcatgaacaggggatcccactgacaatggaaagtggtatcccatgcaacttcaccacctctttgcagaaaatctcagctatacttctggctgtataagggtgtttgagagggacgaagtgtgagtatttggacagcctgtccaccaccaccaatatggcctcaaaccccttagacttgggtaatccagagataaagtccatggagatgtcctcccatacctgttcaggcaccggtaaaggctgtaatagccctcctggagatgtagctaaatatttttgcctttgacatacatcacagctcctgacatattcctgtacagctcccttcatcccaatccaatacacattagcagcaattctcctgtaagtcttgtaaaatccagaatggcctccttgtggggtagcatggaactctctcaaaagagtagggatgagctgtgatttgctagatatgaccaatctgccatcataaaataaaactccctgcttatactcatatcctggtttggctccagaatcttgctgcaactgcctaatgatgtcctgtaacttgggatcttggttaatttcctccttaacttgctgctcctgatcccattgtgcacaagatgtgatttgattcaattctgtcccttcatgcatcctggacaacgcatcagctcctttattcaattttccttgtttatacacaatctcaaaatcgtagcccaacaacttggctgcccaattctgttgctctgctgtcacaattctctgctgcatcagttgtttcagacttttttgatcagtggaaactataaacttcctccctaaaagataaggtctccagtgctgtattgctaacactactgccatcaattctttctcataagcagatttcgtcaaattcctcgctcccaacgccttactaaagtatgcaacgggcttcttgtcttgcattaaaattgctcctataccaccaccagaggcatcacactcaatcacaaacccttttgaaaagtctggtaaagacagaactggagatgtagtcaatctctccttcaactcatcaaatgccttctgcgcttccgctccccacttgaaattatctttcttggttaattcagttaggggtttagctatcttcccataatcccttatgaactttctgtaataaccagtgagccccaaaaatcctctcactccctttacattcttaggagtaggccatgccatcacactcttcaccttgtttggatctacagccactccctcttcagttatcatatgacccaaatactccaccgttttctgagcgaaatagcatttctttttgttagctactaggctgtgttgagccagcaactgcaacacctccttcaaatgcttcgcgtgagcctcccatcctctactataaattagtatgtcatcaaaaaacaccagcacacactttctcagtaacggacgaaaaacatcattcatgaggctttggaaagttgaaggagcattcatgagcccaaaaggcatcaccaaaaactcataatgcccctcatgtgttctaaaggctgttttaccaatatcagactccttaacccttacttgatggtatccagactttaaatccaacttggaataaaagttggcaccatgtagctcgtcaagtaactcctcaataacagggataggaaatttatccggaattgtcactttattgagtgctctataatcaatgcacatcctccatgtattgtccttttttttgactagaatcacggggctggaaaaagaactggtgctgtgtctgatgacccctgctgccagcatctcttggacttgtttctcaatttcattcttgtgatgatggggatacctgtatggtctcacatttactgctccatgattctctaacaagttaatggcgtgctccttgttccttctaggaggaagaccaaagggctcttggaacacttgtgcatattgttctaaaattaaacccaactccttttgttggtgtgcagtcagccttgtccctccttctactcctctcttctccatcccccataactcctttggtttgttgaactttggcttagacaggatgcactgcagcgccaccaattccctttcacacccatcaattccttgcaatataacccatttcttattgctccaaaaactcatcgtctgctgacgccaattcacaatcatatcccctaaggtcttgagccactccattcccagcacgacatctattcctcccaattcaaacaggtgcatctctggagataacttgaactcaccaatgttcaattccaaccctttaaccacgccttgagattgagaccgagagccatctccaagcttgatgctcatggatggggtttcttctatggaccactccatcttgtgtaccaacttctgggaaacgaagttgtgcgtcgcaccactatccaccaagattaacaccggaacaccacatatcctcccctgcagcttgaccgttttatggttctcatacgcaatgtgattcaagttcagaacacacatttcagccttatcgtcttcatcagactcttccacctctactgctattaccttcgcctccgcctcctcgtcgtcgtcatcctccaacaccagaatcttcagatgtttttcaggacacttgtgcatggggtggaaagcgcctccacatttgaaacaaagtcctttctgtttcctttccatcatctcctgataagataaatgtgtgaatcccctttctcgtggtccattgcgcctcttatgattatgggccattttatctcccttaggcccaactccacttcttttctcttcttcctgtccttttaccatgacccagtcagtgcttcctttacccgacccatgggaactgggccggtgtgacccattcccagatttggacccacggtaaaaacccgacccggtgcccttaatctccttctccactgctcttgtcacttgcaagagcttcgttctactcatctcccccatcgctgccaaactcctcaccttcccacggatctccgtcttcaacccatgtaaaaaataccccaggaactgtttatctggaagtctaggtatctgtgctgtgagatactcaaactcagtgatatattcatccacagtcccttcttgcttcaactccgtcagctgttcatacacgtcaccttccccatgacctccataccttccgagcagttcatccttcagattttcccaagacagatcctcattttccccaattagtgaattgaaaaaatggatcgtcggaccctccatacatagttgcgccaacctcaccttgatctccggtgtggtatcctgaactcgaaaatagatctcggcgcgtgagatccaccctgtcggatcctcgccggtgaaagatggtaattctatcttcttcactgcgtgacgaaactccgctagcgattcttcccggatcctgttggtatgcaccctctttgactccttcgtctccaacaacggcgtattcgccggtgttcccttcaccgatcctccaggaccttcctcctcaaacatcgtcttccccagacacttctcaagcattgcaagcagattcgcatggttctccctcaccgcattctgtacgttagcaagtgtggtacgtacttctgagatctcactttctagagcttcgaccttagcttccatctgtttgatcgtcgttttcttgaccggtggcattcactggttccccgtcggagatccgacaggtcggaccaatttgttacgaaccagaaacagagaactaaatgtaacagtgaaaaaaaaagaagatcacagggctttattgattgtaataaaaagatgaagacaattacagaaagtggaataacaattcctggatttctgactcagagctaggccccgtttaggaagttaacacttcctaaccattctagtgacttaatacaatccaagataaattcccattccctttcctactccttatataacagaactactcaactaggccctcactccaagaccacgtcactcccataactaactagtcactaattcccttcttgccccttctagattacacctgccatatcctaggcttatttgtctcattatgaatcagctgctcacgtggcaatgctgcctgggacctatcaacttgcctctgttggaagtccaatttctcttcaggaacacattgatgctatacttgaaggacttccgcaagattacctttcagtaatctcagttatagaaagtaaatttcatccgcttcctattgaagaagttgaagcactgttgctagcccacgaaactcaactgctgaagtttcgaaaacatacttctaaattgccttcgattaatcttactcaggtgaaccctaactctccttcaccgtttggttctgattcttatgcagcgtcaaacaagtcctcacaacagtatgattcatttggtcatggaagttttaaccgcggtgaccgttgtggtggtggtggcggcagtcgtggccgtgggggaggacactttgcaaattttcaatgtcaagtatgttacaaatatggtcatactgcatctgtctgtcactacaggcttgaccatggctgtcaacccaatccttcactcactctacatgatccttcaaatcaaggaaatactcagactaacaactttagtcaaaatcagtattctagtcaaggaaatggttctggtcaaaataactatggatgtggtcaaaataactatggacagaacaatggtttcagatcatcaaattcatggagtcaaggtaccaagcagaacaggtcaatgcaaaacaatcagaatcaacagcctccaagtgcaatgattgcaaacttcaattctaactttcagactggtacccctacaacttggataccacctcatttcatgtgacaggggaatcacagaatatacagcaactcagtccctttgaaggtccagaccaaatttatattggtaatggacaaggtttgcctattcattccactggttcttccactttcatttctcctattaattcaaaagtgtctctatccttgaatcagcttcttcatgtgcctactataacaaaaaatctaatcagtgtcagtaaatttgctctagataatggtgtatattttgaatttcatcctaatcattgtcttgtgaaatcaccgggagccaatgagatcttgcttcaaggctcacttggacctgatggtttatatgtcttcccaaaccttcatctccaaagttcaattgctgccagttcagcttcttgctttgtttcaaattctgtaaccaatatctgttctgatgtaaataatctcaattttgatgtaaaaactacttctgttgcacgtgcatgtactagaacaggctctcaaactctttggcaccttagattgggccaccctagttctaatgttttgagacttgttcttaatcattgtaagattcccatctttaataaaaatgtcttcgaattttgtactgcttgctgtgttggtaaatctcccagattacctgcctctttgtctgaaacagtttataatcaacctttggaattaatatatagtgatccatggggtcctgctcacattccttccaaaaatggttttcactattacataaccttttttgatgcctattctaggttgacatggatttatttgcttaaaaataaatcagaaaccttcactgttttccaacagttcaagttaatggctgaactttagtttgattccaaaattagaagtgttcaaacagactggggaggggagttcagacctctaaccaagtttttagcaagctagggtatcactctcagattgatctgtcctcacactcatcaccaaaatggtgtagtggagaggaaacacagacatattgtggaatgattcactcttcttaaacaagcctccctacctctcaagttctgggattttgctttcgctacagcagtatatttgattaatagattacctaccacctctctgaattttaatgttccttatactgttttattcaacaaaagtccagattataacttccttaaagcctttggttgctcttgtttccccttccttagaccttacaatcgtcacaaacttgaatttaggtctcatgagtgtgtttttctggggtattccacatctcataagggttacaagtgtctttctcctactggcaaacttttcatctccaaggatgttgttttcaatgaagtcaaatttccttattcagatctgtttttgtcttcctctaagtctgaatcacccccctattaaccccacttctttaattccctccatacctatcgttcctcaacccatttcttctctatccccctctagcaattctattgctagtcctacttctgttgatcccacagcggattcaaattccaattctagtcctcctatcagtgctgattctagtcctactattgaacctgaggctcctagtcctatcttggaagctggatccacttttgtgcaagacaattctcctcagtcataagctttgtctccctctgaagcatcacacagtgcagcattggagaatgttcctgcagttaattttcatcctatgcagaccagatcaaagtctggaattcatttaccaagcctttatccaactctgttgcttgctcactgggaacccaagtctgtaaagcaagccttgactgattcaaaatggtttactgcaatgaaacaagaatatgaggcactgatgaataacaagacctgggatttggtttcccttccatccaataggaaagcagtggttgcaaatgggtgttcagagtaaaagaaaatgcagatgggactgtcaatagatacaaagctagactagtaaggatttcatcaagtggctggttctgatttcaattaaactttttcccgtcatcaaacctgttacagtaaggttgattctaaccttgggtctaaccaataagtgggaactctttcaacttatgttaacaatgccttcttaaatggttttctagaggaaaccatctatatgcagctaccccctggatttgaaaaccccaatacctctcttgtttgtaaattgaataaggctctatttgggcttaagcaagcaccaagacagtggtttgatagactaaaatctacactcttgcatcttggtttttctgcaagcaagtgtgacccatctctctttgttttcaaagatacctctcatatcatttatcttttggtgtatgttgatgatattataatcactggcagttctgtcaacttagtccagcaatttactgtcaaacttcactctaatttttcccttaaactacctgggaagctggattattttttgggaattgaagtcaagaccctaactgatggctctattcttctaactcaaagaaaatatataagagatcttctacagaaaactaaaatggctgaggcccaacctattgcttccccaatggtttctggatgcaagctcactaaaacaggagcagacctcttctctgatcctcttgaagccaagtagttggagctctccaatactccactataaccagacctgagctaagttttgctgtaaacaaagtctgtcaattcatggccaatcctcttgaaactcactggacagcagtgaaaagaattctcaggtatctaaaaggttctttacaccatggcctacttctcaaagctgctactccaggagttcccattcctattaaggccctatgtgatgcagattgggcttctgaccctgatgattgcagatctacttcaggagctgctatttattttggccctaaccttatttcttggtggtctaagaagcaacagattgttgcaggatcaagtactgaagctgagtatcgaagcctagctcaatctacagctgaagtagtgtggattcaaactctactgactgaactctattcctttcactactccagcaatcttctgtgataatcaaagtgctgttgccatcattcataaccctgttcttcactccaggacaaagcaaatggagattgatattttctttgttcaggagaaagttctggcttagaaactgcaagtctatcacattcctgccattgatcaatgggcagatgccttgacaaaagctctatctccaaccagatttcttttgttgagatccaaactcaatgtccttgagcctcctccaaagactcaaccccattgagtttgaggggggtattagagtattataaggagctgcagttattcaactgcagtctcatctagcttctagtagaagttagttagttagtcaattctgttagactctctaacagaattgtctatatttagtctttgtaaatctgaagttacttgggttagtaaatgatattttacttcttcatttctctctctctctctctctctctctctatctctttctctttctctcagtagaaactctatgagtgtaatttgctgccttatgattgcatggctttttcctcttctcacaggaacttatagatgtagaaggtgatggaatggctgacatggtttttcgctgcattcaggaaatggatattgacaaccggatgatggtatgatatttgaaatctatattccttgatatatttttcttaggtaaaaagagaaaataatatccaatttaggcttgaaatgattagactaacttccataaattgaaatttaacaatgaaagtgtaaaataatattacggctaccatttctgagatgaaacctatgaccaatattagatacaccacctctaatttgagttcatttcctcctaatttttattggtaaaatatttttcttcttctttgataaggcagaccataattttcttctttggtaattggaaagatatttttcttctatcttaaattctgcaaaattagaatgagaaaaagggagatcatgttccttatgagctgaggtagctctctattaaatgctgaagataactgtaaatgacaatgcagattctgcaaaacaacagaatgctgcagccatccaatgctttccttgctcaatatttgcctgccctctctttcctcccgtacccccatccatatttatgccacccaattctggtatcacaacataataccttctccactcaggatgtagacttgctccccaataataattcctgataaggcacctcagttatgtgcttaggattcaatttcgacatgctatcgttacctcaaagcaattcagtatagctgtttaggctgttacagctttccatctctcttctaatgaactccattggcatgttctctgcactgatcattttctccaattcctcttgcctctacgcatgtggtccatcacctccatttagctccctcctattcagcctattcttttttcctagtataaatgtgtcacatacctccatttgcatgtgtcttaaattagataacttttaagagtcctttgcactttcttattgaatttggagtttccatgtgattagtagtgaattactcatgagtttagtcttcattgtcgaaaaaggaaagaagacttccatctcctaattttattcagacataacatctttttgggtgtaaagtagtgtcaaaccaaactacccaacaaacattagctcctttttgaaaggagaggatccagcctagccttccagtatggctaccttgtgatgacttcatttcagtcactagccctgccttacatgaatttccttctgtcttctgtcattcccagctaaagtattacaagtctctcaagcagtttttgcctctcatttactctttggctgtcaatactaagggactctttggcttgaatgaaaaacactttatcttggtatagaaatttgagcggaaaatataacccaattttagtctgggctattattttgttgagaaatattgtcactctgtacttagttttccaccttcccacctactcaaccaaacaaatcctcaatctttgtattaatcttttgatttgtcacgtcacatctctagttacaagatggtatttgtattggttcatggatcatgagtcatgactaaattgcattgtcatttgccatctgtccaaataactataataaaaatattcctttattttgatagaaccactgcagctctagagggtcttgcgctttttataatctgcacagagcactcctgcttctgtcgttgtattttgaaaatgtcatgcaatttatttatgctgtgaagttgtcttgcagctatatcaacacatagttttaagtggagggagcaccatgtatcctggattaccaagccggtagtttgttatttctcctttgccttggctctaattgtccttaatctttggtgttgctgaactttttggttattattattattattattattattattattattattattatatatatgtccacacatgtatcacatgacactaatctcaatcctttagtatgtaattctgctagatccatgtcaatgtaatttttattgacagttaatgtcatatctgtatggctacatatttgtgattgcctattgtccatttttcagaatgtttacagtacctcctcgcacatttttctttggctgaaagtacctattagaactttattgattttttgagaactaataactgcggattccttttttttatagttaaattgataaacttttcaatgtagttgtaaactggacatattgcaaactagggtacttacctaagtataccaatttaaagatctagtcattttgttacgcattaggtaatatatttctggattctagattgttttgaatatcaagatttaaatgaatttttttggatgtcctttttcagttcttttcctccttttatctggtggacatgcagtctggttttctaaaaatacttccccccccccccccctctccccccctcataatgcgttttcaagttaaagttgataaatcaatattcttcctctgtccccttttttcagattggaaaaagaaatacttgatcgttatcttgatgttgtcctgaagggtaacagagatggattgaaggtaagcttaggttttttcttttcattttgcttctgcatgtgtatcctatgtaccatgtggattattgaagacacatttattctgtaatttaagcttgcttgttagtttagaaacaaccaccaagtttatcctgtacttatttattatttaatactacatattagctaatagagttacttatcgggacaagctatagaatacctcgagagaattgtgtttttggttgagttaaatctgcagatatatacctgaaaggaaggaaaaggttggtgctcttgaattaaatctggttttgtggccgcaaattatgttccatgccttaaattgtgagatttccatctcatgattttgaatcttgattgtagcaaaatattctccgcccaatgtgatctcactagaaaattaaaaagaattaaatctgaagcttatgtttagtccctccgtttatggatctatctcttttctttttggtacttcctccaaaaatgacaacaacagacaaaaagttaaggaaataaatggtgctttaaaggagaaagagaaacactatgtgtgatgtgtgagtttgtaatcatgaattatgccaactcattgttcccttattcttatcttttctgttctgttggtgatcagaaattgcgactaagaatagaggatccaccacgtaggaagcacatggtataccttggaggtgctgtgcttgcaggaataatgaaggtttgggttagctgttaattttggtggtctcttttcaattttcataggtttatgtgtcaatgtagacgtgaaagctattggcatattttaaaacccaggatgcaccagagttttggattaacagggaagattatctagaagaaggaattgcttgtctaagcaggtgtggccaggcatgactttgaggtccatgatcgctctgaaaatgggatatcaattttgggaagcaaaagcgcaccagaggctgagtgatgaatattcaaagctgttaaaactgcctcctcctaaaatagcttgcattaattgctgctggccttgtatagctgtccctatggctactagaggctagttgtgattgtatacacacttatgtttttgtgataggtacgacaagagaattcttgtatcttgtttttgtaacaagaattgtggcaactatgtggcataatgttgaataaagagtaaattgtaaatttttctaactgttccatgttcgttttactctgtcgagagagcttgtagtaaggaatactttacacatataagtcggcaatagccaactagtggattatataatcttgctgtgcaaaa

SEQ ID NO: 37 - DNA, 8853 bp, Glycine max
  source 1..8853: mol_type = genomic DNA
acccaccccttgcggcatttgtacggcatctccggcaaaaggcccaaagtgttaataacaaaaaggcagcaaaacgcactgtaaccgcattccacctgaagactgaagaccaagcgcaccatggacagcaaaaacgtcgtcgtttgcgacaacggaaccggggtacttctctctctctctctctctcacacccctttgcattgcaacggatcttgcaaaatccgtcaaattagttcatcatttacttccacggatccgaacggtgttatatttctgatattatattaaaagttattcttattatttctgatactgtgaatgcagtatgtgaagtgtggttttgctggggagaatttccccacatcggtttttccctgtgtggtgggaaggccaatgctccgttacgaagaatcactcaccgagcaggcgcttaaggtatatatcccaaacccaataattcactaagaagtggttgttgttattcttatgacttgttattattgttatttgttattattatggctttgattatgatatgaacttagattggtacattgtgtgttgtgcttaggatattgttgttggagaagggtgtgcagacttgcggcatcagcttgatatatcttatcctgtgaacaacggcattgtgcaaaactgggatgatatgtgccatgtttgggatcatgcgtttttcaatgaattgaaggtgactttctggtgcttagttttgaatgttcttttaagtattgttgcttcgtcagttggtaaaatggtcgtgttttgacagattaaccctcaggactgtaagattctactcaccgacccgcctcttaatccttctaagaatcgcgaacaaatggtttgtttactgattctgttgcctttgttttagaaactaaaagagctaatgtatcctatatttagttattgaatttagttagaatgcattgataacgtaaagttttttacattgtcatataatcatagattgccatttaggttaagattgtttacttttgtaataattacttcaagaatcatatataaggtgatttctatttagttgatagtataaaagtttttatattgatggtgtatgaaaatgaaactcttaattattttaaatattattgttttatgtgatttggcctgacaggttgagacgatgtttgagaagtacaattttgctggagtgtttatccaaatccaagctgttctaacattatatgctcaaggtgcttatagagatgagtgaaggttgatgttttgtttttctttataatctcaccctgattgtaatttactccccattactcttattacccatctttggaaataccgattttaattgtaagttataacatatagttgtttataaactgtagttgttttatactctgttacagttttgcacatcatatctggtcaaattacgtgtcataatttgcaaagatttgtttgtataatagggagtttctctttgtgccttctatcagcttgcactttaacatttctttacttgtctcaggtttgctgactggattagttattgactcgggtgatggtgtcactcatgtggtaattaattagcttctatgccacttaattataatgctgaccactataatgacagtaggttttatctcttgttttttaatctctgtttttgatttctttgaatgtagcctttcatgtcagttgtatataaatattatgatgtcaaaccttacaagtttatgcccttgttgatcattacaactaatcttagatgaattgggtagtgtaactaaaacatttgacaatgtcatatatctttctaaataatattgtatgttattcttaacaagtaatcaaatattgatacagaaataccatgttgagtggcaatctctattggaaagttggtactggatgagcttgttggattctaaattgttggatgctcattagttaaccatcacccttgctttttatgtgaatatcatattttccttctttcaattcagtgcatgaacatcatcattagtttgtttagcattgttcatatttatggatgggattgcaaatttatttgttatcaatacattatatatacttttaaaaaattatttgttcgatgaaagttttaaattccatggtggatttgtgagcttgtcctttaactttaaataatttttaaagagtgttaaaacttactgtacttttacaccggtgtcagttgatttgaatcctaaatgtgtgtatattggtgttctaacaatgaatttgttgacaaaaattagaaatagtgttacaattcctctgtcaccccttatgccttcattgttgatattaacccaacttccttcagtctggacacatcatgtttcctttttctttcatatatatgggtcagcagttatcagtataacaagtgtctaagccatacactagtgttgggtgatcttgatcctacttatagttactgctaattctgaggtacatttgaatggattccccacattgtgatggccatttaactaaggatcaataggttgaggatcttattctatataggtccaacaaccgagaaaggagagcctgcatacaactcacaaaatgactggctttgatactgttgtatgtgtgttggtcaatgaatttatgcaagtaacaatgtatcatggccagacacattcttaatggtctcttgcagtttggagataatttaagatttatgtagagaacttaaatcagttcttcaagagaaaactattactctccccatggaattttcttgaagcaaaattgaactggtgaaagtgaaatgttgtgacttgagaatggggacctctctattctatttcctttttcctgaatgattatgaagcataatttatgaatgaaacactaactgatcaccaatcagtaatcacacacacgtgttatgttgtacgacccatggtttaagagagcaaaaggtggttaacaagttcagtatgttgccattacaatgataccaaattattatttaaagtatacagtccaaagctgttaataatgaaagtttattttccaggttccagttgttgatggctattctttccctcatctaactaaacgaatgaatgttgctggtcgacatataacctcctatcttgttgatttgctttcaaggagggggtagaggctaactcctttcattaaagttgtaatatcttatgtatgcttcaattctaactggaacataatttttcttccttaaggtatgcactaaataggaatgctgattttgagactgttagggaaatcaaagagaagctatgctatataaggttggctacagatctcaagccacgcttgatttcttgtgtcctttaatctttccataacaggtacatctattttcctgcagttatgactacaagagggaatatcaattggggcttgagaccactatccttgttaagaattatactgtaagttggtatcctggatttcttgaaatctttatgtgactagttccgtgtaaataattattgttttagttggcaattctggttaaaatggctaaggcttgcctgacgatagagggatgggagactcatgttttgctaatcctttaatctgttctttgatgcatttcttttcatatgattttcaagactttctgtaactacattcatacttcttgtgccataactcatgcatgtaatatataggatttattattttattatttattattgttgttgttgttgtccactcacttgtagtgcatttggtttaaaggatggaaggagagggttcccttgtttggtttggtccaagagaagtggaggggagggaaaatatgagtaatatattgttaaccgtaataagcattagtgaaggggacgggaggtaaaataaaaccttatcacatttcagtcagcatagtacaaaaattctaaaccactttcccttcccttcaattccccctaatattggaagggaggaaaaaatagaaggggagagatttggcctcctcattcccctttccttgctactaaatttctgaactaaacaatgtaggattaaaaaaatctctcccctcccctccaaatttcatttatgcataaggtaactgttattaatattgttagaatatatgaaaatatctaatattattttgatcttatctcagaatcttagattatcctttaggattagtttccctatatcctcattatctcttagaattggttatcatattttcttatctcatgatttgtttcctatatagttaggatcatgattagtacaattaagggttagtactctaggttgtatgatcacatcgtatcaagtcaatatcaatctcataatagtctttccttttctcccctttatacatattgatttacccctctgaatcagcttccagatggaagggtcattaaagtaggcactgaaaggttccaggctcctgaggctcttttcactccggtaggtgtttggtgctcatttgacttatgttttctattgttaaagtcatatattctttattttccgcctctttaaaagacagctcttcaaagttcaaatcctatcagaatcatttatggcaatttttttttaaacatgactaaagtattttcacgatgtgactctgcaattctagctagtgtgtaagtgtaatttgctggcttatgattgcatgactttttcctcttttcacaggaacttatagatgtagaaggtgatggaatggctgacatggtttttcgctgcattcaggaaatggatattgacaaccggatgatggtatgatatttgaaatctatattcctttatatatttttcttaggtaaaaacagaaaaaaaatcactaatttaggcttgaaatgattagactaacttccataaattgaaatttgacaatggaagtgtgaaataatattaaggctaccatttctgagatgaaatatgacagctattagatgcaccacctctattttgagttcatttcctcctaattttaattggaaaaatgtttttatttttctttgataaggcagaccatacttttcttctttgataatttgaaatatatttttcttcttctattttaaattctgaaaaattagaatgaggaaaagggagaccatgttccttacgagctgagatagctctctattaaatgctgaagatgactggatatgacaacgagattctgcaaaacaacagaatgctgcaaccatccaatgctttccttgctcaatatttgcctgccctttccttcctcccgtacccccatccatatttttgccacccaattctggtatcacaacagaattccttctccactcagcatgtagatttgctccccaataaaaattcctgataaggcaccttcagttatgtgcttaggattcaatttcaacgtgctatcattacctcaatgcaattcagtatagctgtccagtgctatcattacctcaatgcaattcagtatagctgtccagtgtccaggttgttacagctttccttctctcttctaatgaactccattggcatgttctctgcagcgatcattttctccaatttctcttgcctcttcatacgcacgtggtccatcacctccatttagctcccgcctattcagcctattcttttttcctagtataaatgtgtcacataccagtcagatttttcttgttttcaactttcaatcaactatcttattcgttttttttagtcagcaaattaaggatatatattgatattgtagggtacaaagggtacccaaacctatatacaaatggtagacaccatctcataagagaccatttcctgatccaaggttactcaatattaatataactatataaatatttagtaacctaggatataccaaaaaatttatctttcaaaaaagaaataaataactacccagtacataaatcttctgtgttggatccactgtgttgtcttttttgcatgtgtctcaacttagatacttaagagtcccttgtacttattgaatttggagtttccatgtgattagtagtgaatcactcgagtttagtcttacttcattgttgaaaaatgaaagaagacttcaatcttccaattttactcagacataacatctttttgggtgtaaagtagtgtcaaaccaagctacccaaaaagcattagctccttttgaaagtagatgattcagtctaaccttccagtatggctaccttgttatgacttcatttcagtcactcgccctgccttacatgaattttcttctgtcttctgtcattccctgctaaagtattacaagtctctcaagcagtttttgcctctcatgtactctttgtctgtcaatactaagggactctttggcttgaatgaaaaacactttatcttggtataaaaatttgaggtgaaaaatataacccaattttagtcttattttattgaaaatagtttcactctgtcctcagttttccaccttcccacctactcaaccaagcaagtcctcaatctttgtattaatcttttgatttgtcacgtcacatctctagttacaagatgctatttgtattcgttcatgggtcatgactaaattgcattgtcatttgccatctgtccaaataactatcattaaaatattcctttattatggatatagccactgcagctctagagggtcttgcgatttctataatctgcacagagcactcctgcctctgtcattgtattttgaaaatgtcgtgcaatttatttatgctgtgaagttttgtcttgcagctatatcaacacatagttttaagtggagggagcaccatgtatcctggattaccaagccggtagtttgttatttcttctttccttggctctaattgttcttaatctttggtgttgctgaattttttcgttattattattattattattattattattattatatgtcttcacatgtagcacatgatactaatctcaatcctttagtatgtttttctgctagatccatgtcaatgttaatataactgtatagtgacagttaatgtcatatctgtatggctacatatttgtgattgcctattgtccatttttcagaatgtttacagtaactcctaagcacatttttctttgactgaaagtacctattagaactctatattgattttttgagaactaacaaccggattccttttttttagttgataaactggacatattgcaagctaggatacttacctaagtataccaatttaaagttctagtcattttgttacggattaagtgatatatatttctagattctagattgttttaaatatcaagatttaaataaacttttctggatgtccttcttcttcagttcttttcctccttttatctggcggggatgcagtctggttttctataattacttttttcccctttataatgtgtttccaagttgaagttggtaaatctatgttcttcctctgtccccatttttcagattggaaaaagaaatacttgatcgttatcttgatgttgtcctgaagggtaacagagatggattgaaggtaagcttaggtttcttcttttcattttgcttctgcatgtgtatcctatttagcatgtggattattgaagacacatttattctgtaatttaagcttgcttgttaatttagaaacaaccaccaagtttatcctgtacttatttattatttaataatacatattatctaattagagttacttatcgggacaagctatagaatacctcgagagaattgtgttgttggttgagttaaatctgcagatatttacctgaaaggaaggaaaaaggttggggctcttgaattaaatctggtcttatggccgcaaattatgtgccatgtctaaaattgtgagattcttcccatctcatgattttgaatcttgattgtagcaaaacatcctctgtcccaatgtgatgtcactagaaaattaaaaaagaattaaatctgaagcttttgtctagtcctggatctatctcttttctttttggtacttcctccaaaaatgacagcaacagacaaccatataagttaaggaaataaatgtgctttaaaggagaaagagaaacagtgtgtgatgtttgagattttgtaatcatgaattaggccaactcattgttcccttattctcatcttttctgctctgatggtgatcagaaattacgactaagaattgaggatccaccacgtaggaagcacatggtgtaccttggaggtgctgtccttgcaggaataatgaaggtatgagttagttgttaatgttttggtttttctctaggcataggcttatctgtcaatgtagatgtgaaagctattgacatattttaaaactcaggatgcaccagagttttggattaacagggaagattatctagaagaaggaattgcttgtcttagcaggtgtggccaggcatgactttgaggtccgtgattgctctgaaaatgggatatcaattttgggaagcaaaagtgcaccagaggctgagtgatgaagaatattcaaagcttttaaaactgcctcctaaaatagcttgcattaaatgctgctggccttgtgtagctgtccctatggctactagagggcgagggctagttgtaatttgttatacgcactatgttttcgtgatagatacgacaagagaatttttgtatcttgtttttgtaacaagaattgttgcaactatgtggcataatcttgaataaagagtacattgtaaattttgtaactgttacatgttcgttttactttgtcgagagagcttgtgttaaggaatagtttacacatctaagttggcaatagccaactaatggattatataatctagctgtgcaacaaaata

SEQ ID NO: 38 - DNA, 13930 bp, Glycine max
  source 1..13930: mol_type = genomic DNA
ggcatacatatacatatattcaaattaaaacccgctaaaaactgtaattgcttctttgttttcttctgctgcaggctgcagcttctcgcttctcagttcagtgcccagagtagaggctagagctcccctcagaaaatcgaacacctcggtagggttagggttttcgttttggtgcagagccatggaagccgcagtggtcgacccgggttccagcctcctcaaagccggttttgcgattcccgatcaagctcccgccatggtatgaaatcaattctcaccccaaaatctctttcccccgttgcttctatttttcatttctcaacaaaaataaaagaaattgtgttatatttatgtcctccagcaatgtgtgtctctaattggggcttcttttgattcagataattcccacccagatgaaacgaatgctcgatgatgggtcaatgaccgataacttgacattcgatgacattgctgtcgatccggtgtgccgaggttatgtcagagattgggatgccttggaggatttgctgcattatgtattgtatactggccttggatgggaaatgggcaatgaaggacagatactgttcacggatcctctttgtactccaaaggtttgagcttagaagtttatatatattctatttcaactgctatgcggcttccgctatttggctgcagtgctatctgctatattttatagcagattttcagttttttgcgattttctgcgatccgctattgacaacactgataagtacttactacttatataccctttttatcctatagggtcttaatgtgtatctgtactcttgagtgtacatgtgtttgctcatgtattatccatttgcctccttagttactcagtaaattttaaatactctgacaattttgatgtcatctttttgtgcatatcagtgtattatttatgttttacataataagctgtctatctgttataatctatcaggcaatccttaaaaacaaaattaggggtaacaagtttgtagtattctttaattcaactttttctttaacagtttctttaacagatgtatatattattgttttccaggctaacaaggaacagttagtgcaactaatgtttgaaacattcaacatatcagggttttatgcctccgaacaagcagtgttgtcactatatgctgtaggacgtatctctggatgcacagttgacattggtcatggaaaaataggtatctgttaggaaccaagaattgaaatgaaaaagaaaataaatgattttattgactagtaagaaaagaacagaaaataggagaaagaactctcctccaagggtttccccttcacaaaggatttttcctttcacaaagagctaaagctcaatctaccaatgataagattccctctctcttatccttcttcctctatttatatctaatagactcctctaactaactaactaactaactcattagtagtctaactatattaactaactctcccttctcttaaaaatcaacgtttttcgaaatcctagttaccttgcaaggtccagggttctgtgttgatggtttccactccttccagttcagttcctcattcatttcccaactttgttgtggaaaaacttgatgattccaactatcttcactggcgtcaaaaagttgaactagttgttaaatcacacagattgcaatgtttcgtagttaatttgattattcctcctcgttatctcacagaggatgatcgtgttgctggtcgtatcaaccctgattatgaagcatgggaggttcaagatcaaacgctcctggtatggctgcaatcaactctttctaaatcagtattgtcgtgcgttcttggttcagacttggtggatatccttgacatggtgtatttggcaccatagaaacagaatcattttctcaaatgacagctttaatgcctacaaattgatggaggacgctgtattcctatgttggacatggtttaagaatttggaaaaaggatttcatactccattccacttctggtccagcaatattagggaaggtttttgtgtttaggggggattagcatatagcctttctgtgtttgggtgcctagctagtggtcaaacctatggttacctaattcttgatgtattgcgagtattaggtcaccatagccttgcaaagtatgatgctaggttgtatatataacagtaccacttgaactgatcttcatattatatataatactactattttttgctgaaaaaaaaaacattgaagctgtaacaaatattgtatgttctatctaagtgcacgagtagatggctaagtgtttctctttcaaaatgaacttgctgttgagcttactagttgtgcacaacttgatccttttggcttgcctaatcagatattgcaccagtgattgagggtgctgttaaccacattgcctcaagaagatttgagtttggaggtgttgatctaactaatttcctggctcaagaacttggcaaatccaatccgctagtgaatatcagcatctctgatgttgagaaaataaaacagcaatactcttgctgtgctgaagatgaattagcttatcagaagaccaaaggttcctgccctgtggagacacatacccttcctgatggacaggtatgcctcttggttcctctatctaataattattatccaatgcttgctcatttgcttgttcctgatatatttggctagttcttcaatcaagtttgttttactgtatatctgactatcttagtgtgagttaacattggttaaacaaatgagaaactaacaaaaatgaaagggaggtgggttgaagaattggtaatgagacaacagggctcactttagaatcttagatgttttacttattcttaaacaaagcttatgagctgaagggagaaggtggctgacatttgttaccttgaaatacattctgttttaattccataacaatgtcaaatctgatctggctggtcacgtagagttttctttcactgtgatgcatatgaactggatgttttggcgaatccctctttaagttctcttaaagctttgtgctagaaaattttattttccaatatgaggctgtttagtacttttatttattgatgttgaggcttgctagattgtcattagaatataaggccatattaactgggatttatttttgtatttagaatgttagaattgattgattatagttatttagcttctactttttgtagaaatgatagaggagagaaaagggatttgtatattgattagaaagatattacaaaaccaactataatctctaacaagagctgtacttatactacagagattcagttgtaactgaaaatacagctgtcatctaactaatgacaactatcaactaactacagtttattaaactaacccgagttattcactcacatacacttacaactttagttggttgaggtcttaatgtcttgcaagttgcaagttgcaagtcacaacatttgtaatatcttgaattaatgagatttcagggactaaaaactgaattttaaaaaagtttagagactaaaaaccgaatttttaaaaagtttaggaaccttgattggtcaaacttttgtttaaggactaaaaattgaatttttaaaaagtttagggaccttgaccagtcaaacttttgtttagggactaaaaactaaattttgaaaaagtttagggactaaaaacttagttgaccctatttattattagattgatcctatgtaatcaatactgatcctatttgttcattataaataaaggcttagtatggtcatcctagacaacacaacattacatagtgaagcactgttatatagttcaaacacttgaagggttctgagagatttgttgtcaccatacctgttttccgaaggaatgatgtggtgaatgagatgggaaacatagaggtggtgtacgaagttattggtttcctacttgttgaatgttatcatagaggtggtggaaaggccatgaacctttgacaaggggtgggcatggtatgggttaaatgtaaaagctgagctaaataaaaagattccagttttaaggcataacagtgatccaatttattttggtttggttaactagtttaacctataagatgtggatacaattactttctcgagtagttagtagtttgaacctcatcaatcaacaaaaatgcatttgaacataataaaatctattactataaaaatacagttgatgtattccatgtaaagctgaatggctgaacacagatgcaaggttgaatagttgtgatcaacagtgatgcaatacaactcaatgtgcccgctttgcaataactccgacgaggacgcagcacacctcttcttcaactgcagcaaggtcctccccttgtggtgggagtcactttcatgggttaagtcagtgggtgctttccccaaagaacccaaagaccattttatgcagcatacggtaccgaacgctacacgatcaaaggatatgagatggagctgctggtggatagccctcacaaggaccatatggcaacacagaaacaagttggtatttgataatcaaatttttaatgcaaccaagctgatggatgaagcacttcttcttatatggtcttggcttaaagcaatggaaaaagattttgatacacatttcaatcagtggtcctctaatttggcagatgcctttatgtaattagatagggaatgtactggctgagccctcttccaagaggtgcagcacacatgtacttaagtcaggggttgtagctggtacttaattcatcttgtgtaccagctatgttcaaaatttatctgtaatcacagtacctctggtactctttcatctatctaatacatatttatttttgctgagcaaaaaaaaaaaaaaaaaactcaagaaggaaaggatgaacaacaaccctgcatggctcaccaaaatgctaggctgagcctttgagttcatgattgaaacttgtaacagttgaactgcagcaatggtggctttgaatggttgaacaatggaagtggaggctttgaattgaaccaaggtggtaggggcttctaacagttgaaggtggtggtggtaactttgtataggaatgatggctttaagccacttagcagaagctttttgcgctaagaatgagaggagtctagaagagttaagagttagggccgttgagttaaacgtaggaagatatattgttggaaaggcaccttaattgtagtcacccctaacctgtcttaattgtggtcacccctaagcccgccttaattatggcctattagagttggttgtcaatgtcttggaaagagctacctacaaagggactgattagaaggctgagtaaagtgtcattgtatgcagtcaccaggatgttagctcttagggggttgagatcccccatcaactagagatacaatctaaatagtgcttgtaaagcaatcctgactatacaaactggttttgtgtggtagagttaggctttaattcaaatcctaaatatattttttgaaatattaaactgaatgcagtttggttaactgatagagaccagaatgatgggtgtaggctcaagtaattattgaatgagagacgtaaaacacaagcacaaatacaaatcaataaccagagcaacaactccttagagaagaacttctctttgcccaagtgaatgactgacatgaatacatgagattcctccctctccatgcacacacacccttgtcatgttatttacatgaacaccccctccaaatggcaggctttatcattcactggataattgaatttcattgtaaaagaagagttggattgatatgaaatctgtgtgctggatacagtcttttttcggttttggttttgtttctggtttgttttgcccacctgtacggttgaagattttgaatataagggggaaaaacttaagtgtttcacccactcagtagatttatcctctgtaaaggtcttgtacaggctttagaaaagctgttttttattttactctgaaaatcctatataggagcagccgggcaggttcccctagtctgaacctgtcttttctttcttcttatgtactcttttgacctatataaatatgaatgttcagctgctgagtggaattgagatacccaagcttttactcaaacttgcctatgttctttatcagatcttctatattttatgacttgatctaaccctgatcattgagttatgtgtaggtgattacaattggacgagaaagatatactgttggagaagctttattccagccatgtctattgggtttggaggctcatggtattgttgagcagcttgtccgtactatttcaacggtgtcatctgataatcataggcaacttcttgaaaataccgtggtttgtggtggcacttcttctatgactggtaaactgttatttagtgctcgtgaatctagcatatgtgaccctatgttttttcattaatttgagtagaatagaactaaatattcgactattatattttctattgtcttgggtattaactaaacaaggattttaacataaggtaaaatttgatgtgaaatatttggcaaggcaggataactttaaatatatacagagagagtgattgtcttctggtgtgttatggctattttcaaagacaagagtcacatggcttctagaactcataggaacaactacctagaagcaatatgataaggacttggggattatggggtgcctaagtcctacatcaaatagtatgggatgtttggtggagtaattaaggggttgggttctccccccttatcaactaacttttaagggagggttccccaaatgcttgggtgcttatcaattgttattagagccttcaacctcaaagaacttgtatcttctggataaaacttgctaaagaagctaagagaaaaaggataaaggaaggctgaattatcattgaatgagattagcttacaatgattagtcactacagctggttatatagttagttgctagaataactaacttgcaactaactaactaactctaactcaagttacatgatcagattaagaactaaccacttacaagctaatctatgcttaagagactccctcaaactaggaatggatgtcagacattcctagcttggaatacaaaaactgaaaagcaccaggcatgagagctttggtgtagatatctgcaagctgatttgcagaggagacatgaagcagtttcacaagcccaatcatcaccttctctcgaactatatgacaatcaatttcaatgtgtttggttctctcatggaagacaggattgacagcaatgtggagagcagacttattatcacaatacaaagtagcaggatggtggaaatggaccctgaattcctccaacaagtgagccattgtatctcgcatgtggcacttgccaaagctttgtactcaacctctgattccttgaaatagtttcttgtttcttagacttctataagatcaatgaactaccaatgtatatggcataaccagtaatggatcttctagtatctatctaggcaaccaacccaatccgaatcactaaagccttttcaatgaacttcactgttagcagataaaagaatccctgcacttggtgatcctttgatgtatctaagaattctggatgctgcctgttgatgagctgtagtgggttcagcaacaaatggactcaaatgctgtacaacaaaagtaatatcaggccttgtatcagtcaaatagatcaatcttccaattaaccttctgtaggaggatgcatccttagtggaaagaggagatcctgaatgtttgtgtaatctggtggtgtaatcaaaaggagtagtcagtggtttggaaccaagcatcccactgttagtaagaatatccaaagcatactttcttcgagaaagattaataccagagggtgtcctggctaccacaaagcccagaaaaaacctcaaatcacttaaatcttttattttgaaggcattatctaacagatgtgtaatatgctgaatctcagccaagtcattaccggacaatacaatgtcatctacataaactagtaaaacagtaattgtcttggatccatgcttgagaaacaaaaaataatcagaggcacattgcttatatccatgtgaaatcagaaaggaagatagtctagcataccactgtctgcttgcttgtttcaggccatataaggacctctgaagttcacaagcctctcctggtttatctgcttgcattccttcaggaaggattatgtacacttcttcattcaaatcaccatgtaagaaagcattattcacatccagttgtttaaggtgccagtgattgatggcagctaagccaacaaaagtctgattgtggttagcttggccacaggggaaaaagtgtcaaaataatcctggccttctatctgcgtgtatcccttacctactactcgtgctttatatctctcaattgatccatcagatctgtgcttgacattatacacccacctgcaaccaattgcagtcttatgctaaggaagattagtaagaccccaagtatcattgagctctaatgctttaatctttgcattcatggcttcaacccagtgaggatctttacaggcttgaccatatgactgaggtttaatatgttatgtgacagacataatgacactatgataagaagaagacaatctgctataggagagaacaaaactaataggataaaggcaagtacctgtagagcaactggcagcagttgatggtggatatgagatatagaagtctttaaatttgctcggtctgtgtacctgtctcaaagatcttctaggagtttgagtgatttgctgtgaggtagaaggagtagaattagtgatacttattggattcatctatggtatgatgagttgaggattccataggaaattcatcaaactgatcattgacactatgagatgaagaagtgggtaaagggagacagtaattggattaggttgattttgatcagtgaaagggaagcaatcttcataaaaaatgacattcctagaaacagaaacagctctggttttgagatctaaagtgatgtaaccctttgtattaggtttaaatcctagaaaaacagaagttgcagctcttggatcaagcttctttccatttccagttagggtgctagaaaaacacagacaaccaaatacccttaaggaatcgatgtcataagtagttccataccatttttatatggagttttattatgaagaaaaggagtaggcatgcaattaacaagaatagcagagtgaactaaagcataggaccaaaagatagaaggcagattagattgaaataacaaagatctagtgacattaagtagatgatgatgttttctccccactattccattctgttggggagtttcaacacaagaagtttgatgcaaaattccagtttcatcatagaactacttcataatgaattctaaaccattatcagacctaatgattttaatctttgtatcaaactgcctttcaacagtgctaacaaaattcttcaaatgagattgtgtctcagccttagaatgtaatagaaaaacccaaacaaaccttgcatgatcatcaactatagtaaaaaattcttgtaaccattcaaagaaatcacattacaaggcccccaaatatcaatatgtataagagcaaaagcacaagaagcataggaattactgtcaggaaatgacagctttttctgttttgaaagatgacaagtatcgcatacaaattgtttgtctgaattgagaagaggatgtctgttttaacaacaaaaacctttcaaatgatgggtggccaagtctaaaatgccacaaatctatggacattctattacatgagaaagctgatacattgggggggataaaatctgttgtgaaactggatttatgctctttgcaatcaccaagaggaagcatcttaagcctataaagacctcccaccataccaactgtaccagtccaatcctctgcaggttctgcatatcctgtgtgaagcatttatcattcacgaaagttagcttacaaggcaaacaaaaaagtaatttagatattgaaatcaagttgaattggaagctaggtatatataagacatcctcaagatatagggattgacagaattgaactctgcttgcatgagttgcaatgactgtgaccagtgggaagtttgacagatataggatctatcttcttgtaaaaggaaaataaatgagagaaggctgagacatgatctgttgctcctgaatcaagaatccattcatttggactagatttacttacactgcatgtaatggataatacattacctttgtgtatgttgctagaaccattggaaccactaatttgattcacatgtgaattgttgtgaattgaattttgttgttgtagcactatcatcaaagccttatactgttgagaggtcaactctacttcatcactttgtgcctcttgattcctttctaggacaataccatcactctcttctttcacagcattgatattgttgatgtttgagccttgaggcttatagagcttgtgtccaggaggatatccatgcttttcgtaacactcatcaacagtgtggttggtgaaaccacaatgtgtgcatatcttgcttcctcttccactagaactccctctgcctgagccacttttgattatttcttcctcctttggaaacataatttggagtaaaaccattttttctaaaacatttgtcaacagtatgattatccttaccacagtatgtacacgaattcaatggaattgtgcttgctgctgcattgattagattattgtctcccatcaaatcactgctacttatctgtctttcttgttggacagcatatgaaaagaccttagctatgctaggtaatggatccatcatcagtacactggatcttactgtgttaaattgatcaattaatccgctaagagcatcacacatgcatcactcgatcttgtttcttcctttccataacattactaagagcatcacacatgcattttggatcacatgtacacatgggattaggtttgtaactttctaattcatcccaaataatcctcaattttgtaaaataatcagttatagtgctatcaccttgcctgattgatgccatgtcttgctgcaactaaaaaattcttaacagatcaccttgtgaatatcttgacttcaaatccttccatatatctcgagcatcatccatccataatatgctctgtctaattgaaggtgtaaccgaatgaacaagccaagaaacaaccatgttgttacacctcttccaagccatgtgaaggacatgatctggtgcataccttttgattgagccatcgacaaactcaattttattttccacactcaatgcagtgagcattgatcgactccaggaattgtaatttgatgaatcaagaaggggtgaaaccagtgcagttgcaggattctctcccggatgaaggtaaaagggactatttatgtttagggattgatcttgctgtgattagttgctactcatggtgaagaatcaactgaatagaaaaaggaacaaggattgaagagtcgcgcagcggagctcttcaagagaagagctttgataccatcaaagaacttgcatctgccattgatggataaaacttgtagaaaaaacttgctaaagaagctaagagaaaagggataaaggaaggctgaattatcatcgaatgtgattagcttacaatgattagtcactactacagccggttatatagttagttgctagaataactaacttgcaactaactctaactcaagaaacattatcagattaagaactaaccacctacaagttaatctatgctaagacaaccatctcttttagctgcaaatgagtggtgcgggtggtgacgctggtattgcagtgttcacctgggactagtcaaagggctagtgcacagccaacatgcttgggtgttggggctgcggagtgtggtgggatgttaggatccaattgcaatccattggggcaagagctaacaagtgatttggtcagtgcaggcaacaagctagaccacaagagttcagagttgggtatcgtgggagagctcaaaatctaatctcaaaccatggatctagtaaccatactaagccaataacatgaacttcagtagtatagttccttggaggggtattagccaagggcaagacttcattaaagacatggagaacacttgtgactttgttcatattgtcattaaagtataataattataatgatatatatattgagtaaattacattaactacccataaggttttatgaaattacacaaatttctcttgcttttatctactctacactaactccccttaatttttgaaaaatataccttgaaacctccttgtacattacacaacccccctaatgggaggttactgtaaatgttaaaaaagtaggggtgtttgtgtttcacaaaaccttagaggtggttagtgtaatatattcagttattcacacacatatattgaatgctaactgttaaaatatcaaaatcttgtgctttttcatcatgcaaaatgaacattatatagcactatgggtattataataaattcattttgttctttctcgtactgacgtgcatcaaacaacgaacatcgcaatttgttatgttgtgcattcacccccaaatagtagactgaacaaaacttgtcttgtaactcacttgtcctgtgctgttctgcatgtattgttccttgatatgcatcaaatgtactgtatactccactcttcaatgacttctttgcatttagttgcatatggaatttaggttttctctgattaaccaggaaatctatgttggttaaggcatcaattagttcagtatgttcatgacaagatgagggttatctcacagtaagctgatagctttttatgaaaaagcttactcgtcaatgttggttcttacttcaggttttgaagagagatttcagaaggaatctagccaaagttcatctgctattcgacctaccctagtaaaggtattcttgttgtcaagtaaataatttaatacgcatgtctgacaggcactatatttattttatcttggagtattttaccattgaaagaatttgttatattttgtggccattaatttttgaaatcttgtgtgcatggtaatgaaatatgggattgaaatgcttgctgtccatgattttcttttattttgctattcagatgcttgctcttcccgaggcactcccctgttccctatctttgtggggatagagttgcgcgctaatctttataagagttcattgttatctctatacttttgttataaattattcatatactaatttataattcctatgatgggctggtaatctcggtcattttgcagcctccagaatacatgccagaaaatttaaccatgaattctgcatgggtgggaggtgccatacttgccaaagtagtatttcctcaaaatcagcatgtaaccaaggcagattatgatgaaactgggccttccattgtgcaccggaaatgcttttgatgggattcatctgcacaatttcttcaaacagccagttgctttacacttgtattagtacatgtggtaggccttcatttgattcagattctaaatgctagactcgctagatgtttaggtgcttgaatgattttaaaaaccgtagtggatctccataactatatgcaatcatatttccttgctcaagtgtcaaggcaccacaggtagatgatttcagtaaaatcttgttctgacaatcatataatgtacatggcaagggtactatacttcatgtgtaatgttgacctatagggttttagcattttatattagactagcattaatatgctatgaatgctgcacctgttataatatattcaacgtgtaccagtgttgtagg

SEQ ID NO: 39 - DNA, 3705 bp, Glycine max
  source 1..3705: mol_type = genomic DNA
aattttaaataaaataataattgggcgtaaccagaggtggagagggaaaagagttgaagacttgaagtgaagaaagaaagaattgagaaaggatagggtttagggttggcaaaggaaggaagggatggaagcagctgtggtggacgtcggctctaagcttctcaaagcggactttgcaattcctgaccagactcccgccatggtttcctttcattctccctctattattactcttataactttaatctcataatttaattcaatttttcattctaattctcaactcaattatgcttgctactactctgccatgatactcttcttatcttactcttaaatacctttcattacagagataatttccacactcctttaatgcataattctaacccacttagctattctcaagtaaatgtttaaacttcacaaccgcacaatcatgccacctttttagtacctaactatctcagtcagaatccctaattttccctcttttcatatcactcagataattcccactcagatgaagcaattgctcgatgatggatcagtcactgatagttcactggctgacaatgtcaccgttgatcccgtcgtgcgaggatttattagagattgggatgccattgaagatttgttgcaccatgttttgtatactggcctcggatgggaaattggcaatgaaggacaaatactatttactgatccactttgtacccctaaggtttctcaaacttgtctgatttcccttttttgtttaatggaattgccagtaatagcttaatattcgttttccacttttccaggcgaacaaagaacagttggtgcaactaatgtttgaaacattcaacatctcagggttttatgcctcagaacaagcagtgttatcactctatgctgtgggacgtatctcaggctgcactgttgatattggacatggaaaaataggtatccacacctgaatgctgtggtccatttctcgccattgtatataccttgtgcccttgtgtattctagataccattttttttgttgcaattttctttttgtcttgttatctgcatggctgagtggaaagaatcatgtgcttaggcacctatatgagataacatagattcctaggacagtttcacagttccaccaagccagttttttccttatgacttgttttcctcacggaatcaatttgaaagatgaaacaagttattttccacaattttctcttctgcagttaagtattaggagttacaatatttcaactttctcatgtaatcaagaataaattttgattttaaatgtagttggtaaatgcaatgaggaaaatattactcaaaatttattgaaaatagaacattaaattcttccaaagatgaataaatttcaattgctcttttaggggcaaagatatgttcaataatttaaaagtatcaattcatggtgtgaaaaatgatttttcctctgatattgtttttatcttcaatcatggtttgagatggccattataattgtgttccagtaaatattgcattctcaattggagtaaataaatagatgtctgagtatcttcaaatatgaaacatgttctgtagctaactggttgttatgtgcatcatgatctttttggtttgataactagatattgcaccggtaattgagggtgctgttcaccacattgcctcaagaagatttgagtttggaggtactgacctaactaatttcctggctctagaacttggcaagtccaatccacaagtaaatatcagcatgtctgatgtggagaaaataaaagagctgtactcatgctgtgctgaagatgaattagcttatcagaagaccggatattcttgtcctgtggagaagcacacccttcctgatggacaggtctgctttctgaatttcaaagataggtttgactagtgatactaattgatagagggggaaggaaatatgggaatgaagaatcagtaaggagagaaaacaaggctttctttggattattatgattgattgatttaagcaaaacttatgagcaaaagtgaggaggtggctgatgtttgttactctggaatacattctgttttcaactttctgtgattagaatttaaaaatctgatctttgtagcttatcatgcagatttcttttattgtgttatatattttaattagctttttgaggaaatcctttgcaagttatctgcaagctcaaagtgttaaatgttgtatcagtaacttccatattccattaggaggggcagtgtaacagtatgactccataagtgcgtttgagctggatctctatttaatgagccagctgcattttttttagactgggctgacaaagaattgtctttcaaaattctggaccagcctgaagattatttcgtttccgagccaaactggctggtttgatgggataaaaactaccaaactcaccaagctttgtttccttcccccaagtgttaacgatatgtttttatattctaagttccataaatggatcttcaattcaataatttatgacttcatctgaaagttgaattatcttataggtaataacaattgggagagaaagatatactgttggggaagctttattccagccatgtctactgggtttagaggctcatggcattgttgatcagcttgtccgtgctatttcaactgtgtcatctgataatcaacggcagctgctggaaaatactgtggtttgtggtggcacttcttctatggcaggtaaattttaatcttcagtagttctggtgagtttaggataatcctgacaagatggggattatctcacaacagttagatttcttacctaagccaatgctgttgctatgagtaaattctgacaggctaatgctgcttctcattgcaggttttgaagagagatttcagaaggaatctagcttaagttcatctgctgttcaacctacactcgttaaggtaatttggttatcttgagaagtaacttcaaattataacaacttaaatgttataataaataaatagctgtttttttctttcaatttggtagattttaaaatcaaaatttgatgagaggggaaaaagggtttttgcctcttttacatgaataacattaaaaactgcaaagatactatcattgttcttgtattaacttatgtttcaactggtggataaatctctggcttactgcagcctccagaatatatgccagaaaatttaaccatgtattctgcatgggtgggaggtgccatacttgccaaagtggttttccctcaaaatcagcatataactaaggcagactatgatgaaactggaccttccattgttcaccggaaatgcttctaacagtatctatccacatggtttcaacaactatttattcctctgcatctactggtactgtaacatgctgtaatagctgtatattccaagtgctagatgtcgtgtatatcttaaaagctgcagcgatctccattaatgcaatcttctcactctgcatgacttcccaggtagcagtggaagatttccgtaaatacctgttccttaaacatgcatatgttggagctctaggagcttgcatatctttgtaatgtggatatctcctgtaaaatattcattttggccatttgtaaccttgtagcctgtagctactagctacacctcttctagcacacccctttgttccttttatatgatagtttggaatttatgttttaa

SEQ ID NO: 40 - DNA, 3691 bp, Glycine max
  source 1..3691: mol_type = genomic DNA
gaaaagagaagagagattgagttgaaggggttagggtttaggaagggatggaagcggcagtggtggacgtcggctctaagctcctcaaagcgggctttgcaattcctgaccagactcctgccatggtttcctttcattctctctctatcattactgttataactttaatctcataatttaattcaactcaactatacttctctgccatgatgctcttcttacatacctttcattacaggcccgcacttggagaggttttatctccttcaatgcataattctaagtttctaacccacttagctattctcaagtattactttggacttcacaaccgcacaatcatatcaccactttagtacctacctatacctaactatctatctctgtcagaatccctaattgaccttctttccattggactcagataattcccactcagatgaagcaattactcgatgatggatccgtcgcagataattcactggctgacaatgtcaccgttgatcccgttgtgcgaggatttattagagattgggatgcaattgaggatttgttgcaccatgttttgtataccggcctcggatgggaaattggcaatgaaggacaaatactatttacagatccactttgtaccccaaaggtttctcaaacttgtttgttttctcttttcctgtacacatttaatttcataccccttttatgtgtcactctgtgtatatgtattctttcgtagatttttgttttctttttcatctttatgaactactcttgcaaccttttgttacatagaactgccggtaataagttcgtattcttgttttcatgtgcattatatagcttttcttaattcgtgcacgtgttattgttttccacttttccaggcgaacaaagaacagttggtgcaactaatgtttgaaacattcaatatatcaggattttatgcctcagaacaagcagtgttatcactctatgctgtgggacgtatctcaggctgcactgttgatattggacatggaaaaataggtatccacacctgaatgctgtggtccatttcttgccattgtatataccttgtgccttgtgtattctagataacatttttttttacaatattctttttgtcttgttttctgcatggttgagtggaaagaatcatgtacttaggctgctatattcggtaacataggttcctaggattaatttatcagcagtttcacagttccaccatgccaggtttttccttatgacttgttttcctcactgtcaaattgaaagctgagacaagttattttccacaattttctcttctgcagttaagtattaggagttacaatattttaactttctcatgtaatcatggttaacttttgattttaagtgtagttggtaaatgcaatgaggaaaatattactcaatttattgaaaacagaatattaaattctgcctgagattaatgaatttctattgctcttttaggggcaaagatatgttcagtaattttaaagtatcaattcatggtgtgaaaaatcatttttcctttgatattgtttttatcttcaatcatggtttgagagggccattctaattgtgttccagtaaatattgcattctcaattggagtaaataaatagatgtctgagtgtattcaaatatgaaacttgttcttgagctaactggttgttatgtgcatcatgatctttttggttttataactagatattgcaccggtaattgagggtgctgttcaccacatcgcctcgagaagatttgagtttggaggtactgatctaactaatttcctggctcaagaacttggcaagtccaatccacaagtaaatatcagcatgtctgatgtggaaaaaataaaagagttgtactcatgctgtgctgaagatgaattagcttatcagaagaccgaatattcttgtcctgtggagaagcacacccttcctgatggacaggtaagctttctgaatttcaaagataagtttgactagtgaaaatgaaaggaaatatgggaatgaagaatcagtaaggagaaaacagggatttctttggattattatgattgattgatttaagcaaaacttacaagcaaaagtgagggggtggctgatgtttgttactttggaatacattctgttttcaactttctgtgattagaaattaaaatctgatcttttagctcatcatgcagatttcttttattgtgttatatatttgaattagctttttgaggaaaccctttgcaagttatctggaagctcaaactgttaaattgcatcagtaactaccatattccattaggaggggcagtgtattagtatgtctccataaggacgtttgagctggctctctatttaatggaccagctgcttttttttagaccaggctagcaaagaattgtctttcaacattctggaccagcctgaagattatttcgtttccgagccaaacaggctggtttgatgggataaaactaccaaactcatcaagctttgtttccttccccccaagtgttaacgatgtgttttatattctaagttccataaatggatcttcaattcaataagttatgcattcatctaaaagttgaattatcttataggtgatagcaattgggagagaaagatatactgttggggaagctttattccagccatgtctactgggtttagaggctcatggcattgttgatcagcttgtccgtgctatttcaactgtgtcatctgataatcaacgacagctgctggaaaatactgtggtttgtggtggcacttcttctatgacaggtaaatttaggacaagcctcacaacagttagatttcttatctaagccaatgccgttgctatgagtaacttctgacaggctgatgctgcttctcattgcaggttttgaagagagatttcagaaggaatctagcttaagttcatctgctgttcaacctaccctcgttaaggtaatttggttatcttgtgaaataacttcaaattataacaacttaaatgttataaataaatagctttttttttctttcaatttggtagattttaaaatcaaaatttgacaaatgaataacattataaactacaaagatactatcattattcttgttataacttgagtttccactggtggataaatctctggcttactgcagcctccagaatacatgccagaaaatttaaccatgtattctgcatgggtgggaggtgccatacttgccaaagtggttttccctcaaaatcagcatataaccaaggcagactatgatgaaaccggaccttccattgttcatcggaaatgcttctgacagtatctatccacatgattttaacaactgttggtaccgtaacatgccataatccttgtatattccaagtgctagatgtccatgtgcgtgcatatcttaaaagctgcagcgatctccattaatgcaatcttctcactctttacgacttcctaggttgcagtcgaagatttccataaatacttgttcctcaaacatgttggagctctaggagcttgcatatctttataatgtggatatcccctgtaaaatattcactttggccctttgtaaccttgtgggctgtagctactagcacacccctttgttccttttttatgatagttttgtaatttttgtcttaaaattatgaattagtaatatatctcattaatagtttg

SEQ ID NO: 41 - DNA, 23769 bp, Glycine max
  source 1..23769: mol_type = genomic DNA
tttcaaaatgaaaaagcatgccctcctcattttctaaaccctcaaaatttctctctcttcttcctcaatgtgctattccttcctctcttgttgtgccttcctccctcgtggttccgatcttcgtcattctttccgatcattcttggtcatcttctgatcatccttcgttctctcttcttcttcctttgtgagcatcacaggttaaccaattcttcaataatttctttttcttctcattaaatttcgaattgttatggattagggttatgcttttgtttgtttcattaagcttgtgaaatttctctcaatcaagttcctgtgaaaataaagaaagtagaatggtgtgataaaaatactgagattatgtcgaaagtgtgcatagaagaggtgaatgctggaaataaacctcatatacaatagtaggaatagagaaatatttttagtataaaattgaaaatgtgaactccctggaccaaccctttctatttaccattagatgatgatctgtccaagttgcttaaaaagtttccagaagttcttggatgtaatttggaggaagagttgaaaggtaatgtaaagatcctggaggagcagagttgtattaagggaaattctcttaggaaacttctccttagaaatccaaaagttttgggttacaatgttgattgtaagggagactatattgcacaatgcactagatgttgggctcgcttctagatgattgaatgagatgtatctttttgcaaactggttgactgctgcataatttctttgttcattcatacacactcttcaacttaaatagaaggcagagttgtatgtgaagaaaggttctcattttcttggatgcaaagtggcaagaagtactaatttattctcaagttatagaggttgattttgcaattatgattattgttgtagtatccaatgacagaggttgattttgcaatcccatcttgacagacataggcataacatctatcttgatattatgtcatctgtaaaatagattcctattgtctccaatgaagctaccaaatatagaggaagacttggtggaaccaaaatcctttctgagcaggtcgttggcattcattattttaaagccatgttttaaagaggctttgatgtatgttgtcaattagttcctactccaagtgccaacttagttaccagcagagaaatagttcttggttgctacttgtactcatattggaatataaaactttgagttgaatcattaaattgagcggcaaacttatatttcactatggtgcctgataaaagaacatataccagaagttttggggagtaggtattgttgtacagtaggatagtcattctacttgattactgccattggtacttgctagtgctcatgttgtgtgaatctagtcagttgtagaatgattttgacgtagagatagaacattgttttagtggaataactgaagtgattcggacattcattatattgtatagtgattagtgaagcttaagttaatgcgcataacttctatttaagttaatgaagcatatatttaaagtagagtttcccaatctgtaccagcataaccattcctttgtatactgcctttggcttcatacaataatcccttagtgggtctcctcagatggatctgatggaaccaccacattccaatgtttgtcacatggactcatacgttaatgttcatggctgtcaagaacaaaatcatgagtgaaaaagggagcttttgttttcttttcatttacttggcttttcaattgtttaacttattattctttcttttctccatttttttcttagaataatcatttagtttttaataggattatttccccttttttttaatgagtgctacattgagtttgttcccatctttttgcaaactggttgactgctgcataatttctttgttcattcatacacactcttcaaattaaatataaggcaaagttgtatgtgaagaaaggttctcattttcttggatgcaaagtggcaagaagtactaatttattctcaagttacagaggttgattttgcaattatgattattgttgtagtatctagaccatggaatgaagtaaatcttaatatttgatcttatgttgatataattgtaactataatgcatatctcctctccctgtgaaaaggaatatattagaatgaaataaaatgattataggcctttgttgtttgtattgcttaaggtggaataaaatggtacatggtgtaaggcatttcattctgtttcatgcctctctttttcttttcttccaatggtattaggtggatttttttatctttgttttcattttcatgataatatttgcaaataatggatggtaacttaattctatttcatttttattttgattttattcataattaaatattgaaaggtagcataaagggaatggtttacaactttttttttgttagcagggttgtcatgttcagattgtgtaaaaagaatatatttgcaagatagataaagaactaaaagaagtgataaaagaagcatattctctaacattttttaatatattccatttattatttcaatcttaaaaactataaaatgaagggtaatattactattttttaataatacaagtttgcatgtttatggtatgggtacatgtgaacaattttatattggaagacattattgatcgtattattacgaggttaatgacattttatattttgttataaattataattacatagataataattaaattataaactagaatgtaagtgataacattactaaaacaataaattaattagattttaaatatgaaaattaattatgtagaaagacgtataattatatttttatgagatacatttattttatttttataaaattaattattttttaatcaaaatttctagaaaatatataacaatattttaaatataatgataaagttaaaatatttttataaatgaaatagaagaaaaaaagtaatttttattatttttaataatatttaattatttaaggcatttaataattatataataatgtttaagtatttaattattagttttaataatgtcaaagcatataatatcttttttggtaattttaattatgcaaaagaccttctataatttaatccaaataccatattaatttaaataaacactcaagagtttatcatccaaacatcaaattaatttatgtaaaagtaacttttcatataagagcttcttgaacaagttctttgtctataagatcttttacaatagtacatccaaacagaccattaatcttagtcttatctgatatagagtaatataagccacccaacattcttctgacactactacaaaaagcacatttaacattgtcaaattaacatcgattttataaaaaaactgatgttaaggtaaacgcggtgacatatttgtaaataatgtatattccttaacatcggttttccgtaaaacctaattaacatcggtttttcgaaaaactgatgttaacgtcttttaattaacatcggttttatagaaaaccgatgttaacgaaatggtgttaacatcggtttttctcagaaaaccgatgttaacgttaacttcattcagttaacatcggtttcttattgaaaaccgatgttggactcatattttaaaatttcagaacccgacccctagttactttcctcgcgctctatttttgcttcttcgttttcttcttcacttcttcttcttcgcgaccgtgagtacaacttcttcaggttctttgtacagcttcttcgcgaccgtgacacgtagccatgttacctaggtacaacttcttcttcttcttcttctttgtaaccacaaggaccttagtctttgttgtcttcttcttcttctttgtttctttgtttggggaacttgtgctcactgcaaggatgtttgtttgtgtgtgttgcaaggagttggtttgtggaagtcgtgctcgctgcaaggattaggttttttctcgcattgtgtcattttgagtgaggtaaagtatttgatctctaagcttcatttcgtctaacctactaggtttgtgttgtttcggttaaccctaggtacatttcgtggtgacctaatcgaggtacgaggaaagcttcaagtcatcgcgccattgttttagatctcactaccattgtcactgtttgggttcgaggtaagcttggtccctgtgcctttgtacatgttcaggttgtttggacttaatctctagttggctttttgttttcaatgtatttggttcaagagcccagtgcagttttgtacatgtttaatcaatattgataaggattatgaagattagtgttgtttgaagggattacatattgaagttgggatatgtcgtcttgtccggttaagcctaggtgttatgattggtcagcctgcccggatagtctggttgggtggttgtgaagtagtcaactagttgctgtgttgaattgaatgtgatagaaaatgatggcttcttaattaactatttcctgattgtgtaattagctgcgaactaactgcttccttacttattagataattaacacataacatgtattcttagtttcttaccatccatgaatagaaatcagggaaaataaaagtaaattaagaagaataggtaagatttgcttgaggattgaagtttgtagtttatcatggacattgacaactccatctaaatacaaagtgaaatattgttctaagcactcaaataattaggtttttcatagtaactataccgtgcaagtttgtacagcagaatctgctttgcgcttccgaagtccaaaggatatttgcatagtaactatatcattttatataatactacagaggaactttaccagcatacaaatattagaaattttataataactatatttgcatagtaactatatcattaatattagaaattttacaagcacgaaaatcaactaataggttatatttgtctatttccacattcacaatatcggccagtgttttgttcattccttaagcccaatggatatttgcattataaggcacattaggttataccaaacattcatggaaatcaactgtaaaacttacactttttagatggttggttcttgacaaatatgcatattggagaaagactattttaacctagaataaaagatatacatatgtctatttctcaaaaggttttcacgatatgatattacttaatatacattgttgattttttgagatcatgtagtagcagtacaagtaaaatcatcattattctgacctataacacattaataatgatgatgatgatgactgcaccaagtttagaacatgttccccagatttgactcgtgatgcttgaaagcgtttgagacttcacacaggcaaaatgggcaggggttggagaattttgcatttgacacttattgtatgctgcacatccaaccataacaccatgagccccaacttttagagctccattgatcaacagttgaattccacaaatagaagcatgagaacattatggaacttatactgagaacaacaatttcaatgctagaaaatgcctatagattcatcacatttatgactacactaaaccatctcaaaaaccagaaccaaggaggaaataaattatttggtagcttaaacatcagattattagcaaaattatagaatctagttaccagaattttagcacaaaaaaagcagaccagcctcatgaaaatgcctaatgatatcttgaacaatattagcttttgtacattgacttatatgttaaattcaaaaaggctttggcatggtctcaaattgtcttttactgatagtgactggccacaagtagaattcaagaaggtataacactgaatttatacaagatagtgatcattatacaacaaaatcaaacaaaaaaatagaattaaatatgcatacacttatatgcatcaaggatttttgtgatcacaaagtacctattaaactctaaggtaacttttaaggtaatgttatacatctaactatactatatggtagtgaatgttgggatgtaaaggaacgcgagaaaaaggtgggggtagcataaatgagcatgttaagatggatgtgaggccacacaagatgaaataagatatggaatgattatataagagaaacgttagttgtagcactaattgagaaaaagatgaccaaaaatcaattaaggtagtttggacatgtacaaaaaaggtcacaagaggtaccggggatatattatatatgagaggcatcagagataaatccagccatgggtgacggtgggtagtgttaaaacaggagaaaacaaagggaaattgattgaaaccgtgtgttagaatacaacacaatgaatgcgtgtttatataggataattacattaattacacataaatagagaatattttgttttctctaaatcaaatattatgttcctataaaccactattgttaatagaattagaatattatattctaattttcaagaacaatagttttgacaaaggtatattgattttaaaattctataccatcattgttagactttgattttgaagagtttcaaagttttgacaaaggtatattgatgttccaattctatagtaatattctaattaaaatatttattgagtaacaagaagtttttttgggtttttttacaaagttggtttctcagcaagatgttgccagttcaactactttttttcttgaaaagtagtgtcaggtattagtgctaattcctatagtctacaagactagcaaggtatgtcaatgttacactctgcatgtcaattttgttttgttttggattgtgtgtaaattaactattggttttggtcccaggcagaggtaatgttgaggttggtgaaaggcattttgttgttggatggatgtacttttagaatttcaaaactttaaactcttatttgtatttagttttgttcagacttcatattctggtttaattttagtaactttagtatcttattatggttatgacagaacttggtcaagttcaagtgtaggatgaattccttttatttagcattgggatcatgaaacaaatagcattgggattgacttagcttagaggcttcaacagatctaccatttgttcgattgtaaacacattttgacatcccaaatccgaactcctatacataatgcttgcctttccattaagatactcctgactggtattcaatattgtgtagcacaacaaattttcaatgcactttatttgcttttatttgtttattcatttactaccattaaggcaagaagaggaccatatgaaagaatatgtccagtcttcaagaatggaccagtgctctctaactgctacttctgaggagcaatatgttaatattgagatcaatgaacaactgatcagaggttggcaacaacagggatacacctatcttcactatggagcaattaggctggaattatccttacatggcagaagaagacttcctgtgactaccagagtatcccttctagactccagttacatccattatgaaaatgccgtgatcggaactgtaataactactctccatgccagaagtgtagttctcatcattttcccaaattacaacgtcaatttgagagatcctactctcccacaaagaatgaaaatccaaatccagatcattggagcagaacaagtatccgaagctcattctgctaccttgcatcatcagatcatatatagattacataatcatgctgtcaatctatctatgcctactagccattatagtgctctctttatcctagctaataactaggaagaaatttcatctattgtctagatccccagaaacatctctagaaaagaactgcaggagttgatccctcttcaatgggtgaccggttacgagaagctcagagagaatactaagcctcttagtacttctcagaccacttttagaagatctgtagatgggcttgtaaccatgaccttcaagaaaccagatgaagccagtagtagcaactcttcagaggtttttcattctttaatgataaaacctaaagttaaagaagacaacagaatgccgatatttttccgtcaaggcagatggaagtgtgatatattcagataaagtaaatggacactttatctgggatgctgctctcgaaatgtgtgattcagactgttcctatgattaccatgatggagacacagacgaagatacagatgatgatgatgatgaggacagatggaagccagagccaaggccttgcaaaccacctccaccaccacaaaggaggagtgaccctggaaatggaccgtggacggggataaagaagaaatatccaaaagaccctttttggaaggagaaaaggatgacaaaaattctaggttggaatcatccatcttttaagatccctaaaacacctataccttgcatgatgttttcttccacatcctatgatcaagagtttccatctcttgacagaaaaatagagccaatgacaaaagtttcaaccaagccttacatgattcctacggaagtagggccagaagggaagcttaaaagccctagccaagccaaagaagtcttaaattggcaaacagataatgccagagcctagaatcatctcttgaaaaaagatagatgagaatattgacaagatatgtacccaagtgagcacaaatgatgaaaaattacattatctgtctgaaaggatgaagaaacaataccatcaactttccaaggaaatttcttgccttgaagaagaatggtgaaagaacactttcgaagcagcttctaatgccaaagaaagagaaataaggaggcttaaagctcaagtccaggatctggatcgatgcatagaatcaaagatgatagaaaaacaaaaggttgtcttagatctttattcctttttaacccctgcttctcctactttctattctccattcccaaaccctcccgcctacttttttcctaaagctagcccgtcttggtctttgcccacaacctcagcttataagaaaaaaccataacctctaaagagagaatccacaaaattaaatatctcttctgaagagttagtcgaatcttccacaagattaagagaaactctaaagaaagaccacttgactttcaagattatcaagatccctactcccagttatcgattcaacacaagctagaagcctcagaagaatctcatgaaactataacataatctgatgaatctaaggaacaatttgaagaatcttcgacagaagcagaaaaatcttattctggtgaagaagaagaggttggacacatggacatctcaaacatcttgatagcccgctccacagaagaaccattctatgattctcctgtagaagaagaaccaatgatctcaaagggttcatcctccaagccgaatggaggaaaaaacttattgagatgggagcatggctcgatacaaaattcatgaaagatgcagatccttacaaagtaattgaagaattttgttgtcggatgacgggaacattgaaagaatggtaccacaatctaggagctgtgcgtcaaaaccagttccatgaattgagatctgctgtagctgttctggaactctccatcaagaatgtactggagaaggaaagatcattgaaagaaagatcaaacaagaattgtttgaaatgaggtgttgttctttaaaaataaaagatttggacaaacatttccaaagaatgaatcagagattttatcttctcaatggtctcaatgatcctagcctgaagaatacatatgtagtttcattaccagaagaaatacaaccagaattaaacaagatggtagcggccgcccaaatggatttttctaccatgtctatgggacaaatccatcaattcactctggaggtcgttgacaaattatgtagacaacaccagtatttcttagatatcatgaacataaaatccaagtatagcagagcatgctccaaaaagccttacttggagatcaaatgcaaagagaatacctgtcattgctcaccaaagaaaaagaaagtcttacaagttgataccaagcggaaaaaaggccattgaagttttttaggagaagacagaggaaaggaaaatccaggggacaaagatgtttcatttgcaaatagacaggacattttgcaaaaaattatcctaagaagtcaccaaaagccatcagactaatctctcatcttcaaatcggtgaatttgataatatagaatctctgtactctgaacaaagtgaactagatgaggatactgaatttgccttaaattagacagattcttctgatgaagaatcttcagcttctccaatccccatctcctctatacaagaagaacagtctatcaggctagcgattcctcaaccatgtgttgaaattcaagtgttggccaaaaagtttgaaaaacctatcaatgttattgcctttatagacactggagctcagaggacgatgatgaatccagatattctttcacaagaatattggaaaaatgaagtagcctatcttgtagctgctaatgggaaatttttcagaagacttagtaacacatggtccaataggcattaagtgtttttccctgattatatcatctggaccaaagtcattggaagcaaattgcctaatagagacctcctcataggaatggatgtctatactgctgccaataaactctaaatacattataccaggatcaaattcaaaagagaattgaagcctttttcagaaattacaaggctcttctctttagcagaagccccgctagaagttggagagtttaaacaaaagatttcctccggatgtgcagacagtcatgaagatttcaaccatccatatcttttatggaaaaacaaagaatactttgttgatctaccaattcgattaaatgaagatatcaatccaacaaaagcaacccatcaggatgacacctttagatctacaagcagccatacaagaatgccaagatctactaagccaaggtttgattgagccaatccagtcaaattgggcatgccaagctttttatgtagaaaaaaaaagctgaaaaattaaggggaaagaaaaagttagtcattgactataagtctctcaatcattttcttaaatatgataagtttccaatcccaaaggcctcatctctcccaaccttgatcagagaatcaaacttattttcaaagtttgatttaaaattaggtatttggaaacttggcctaaaaccagaagatcgatataaaatagcttttttgtattccaaatgcgtatcaatggatagtccaccttttggtataaaagtagcaccctctctcttccagaaagccatgaccaaaatctttgaacctattctaggaaacacacttgtctacatagatgacatcctccttttctcaaaagatattgcctctcataaaaaattgttgaatcaattctttgagatagctagaaaaaaagattcaacttgctcaatcccagattgatttcttagggatgcatttttcccagggtacttaccagcctcagcctcacatagctcaagaactgttaaattttcctgatgaaaatctcatagtcaaacagatccaacaattcttgggaattgtaatttatataagagattttatccccagagcagcccaatattctagttcattgtccaaacttttgaagaaaaactcttctccatgatcagaagaacagacgataacagtcaaggaactcaagaagatgcccaaaatcccccagccttgaagattcctggaacaggtcagaggatattacaaactgatgcaagtgatcattattggagagctatcatgatagaacaggaaggagagaagaattattagtgtggccatgctagtggacaattcaaggaagctgagaaacattatcatactacattcaaagagaatcaagaaatttgattttcatttgagaagacaccagtttcaggtttgcatggacaatttgtcatttccaaaaattttggaatttaaaaacaagattccaccatatcctcaaattttaaggctcaaggattggttcttcagatatgatttttctgtcaaacacataaaagggaagaataattgattcctgatttcttatccataccaaacaacaagaccgttaaggtggtaacttccactcactccttcccattgatattcatggtaaaaccaaaccattatctgaaacaaccaaaactatcaaggttttcccttcaggattgattacccatactcctgcacagatccttgaatatgctaagtctcattacttcccttttctgcatgaaaccatgagattcaaatacactccaacacaaatatttgaccctgagataccctttggaggtatatttgaactgttctgtgagattgggtgggatttgtgtgaaccaaccatatgggccatttggtgtaatacaatacaatattcaatccccatcgccataaaacctttgatgacatacaacatctagacagatccatataagaatgaatatcttttatggacaatgttagagtggttttctcctttagcatggtggcgtatgaagttgaaacaaattctagacattgtgagacaaagaggaatctcagaagatctcataggagaactagtttctattgtgattattcaccaaccttaccttatggagcaaggacaactctggtctagaaatgaagctcaaatttggggaacttttgaagcatattccttggaggaaagttatcgcaaccagccggcaagacatctctgtgaagtcaataattagtcatacaaatttgtggatccaaatctaccaagttcatctcaaaggccaagggatagttatcctactgataggataatacttcagaatactaatgatgctcagatccgaacagagatttatgtttcggaacttgagtttcaaaaggtggaagatttggttgatgggcattctgcattagaacaagactcggaagactacaatgctcaattgatggaggaattgttacacaaaaagagatatccttatcaccacctagtgtacggaagtctcaccagatcagaagtacaacattacaacttgtcattatccaccagatcagactagtgactgctgaagaaatcttgtatatgttgtatatgggtgtgctgtaaagagattaatcttcaggataaggataatcctatcttcgtcattgtgtgtcaagtgtcagtcgtttagaagatgccttatcttaagtctactaagccttatcttttctataataaaatagattctatgttatctgttgttgtaataagcttatccttccccagataagactttatacgttagtgtccattcctctcctatataaaggggatgagtctgtatgttgaggcacattgaatcaaataatactctcttcttactaaaatgactttcttataaattccttcttctctgaaactctgagttatataatgattaacatttgaaactctcaccagctagtatgctatacactcacctctttggaggatcttgtgtatcagaacgccgaatattgatatcaattggtgggttatccctatggtctgtagatatcttgcatcaaagttatcctgaaatgcttaatgtcttgggtatgactcaacaacataatgaatacagagataatagatatttataaactatcaaggaggcaattcaaccgaatggtatggtcttgctgaccttgactatttgatcatttggttttgttccatgaggaaactcaaagtgttgtgaatttatattggttttgggaatttggaacttgaggtggcgtattctttaaaatatatgattatgaatcctttagtaattggttttcacttttcgcatataagaatatataattatgacatacaagaatacttatgatactttaaaattataggtaaaccactgctacatgtttaataagttgtataacaacttaattaggaagatttattttaacctttagtaattagctcaatatttttataaacatttttgcctttgagctttatttaagtacaccatgtgaatatattggctgctgctatagtgaaaacactgctgcatgtttaacaagttgtataacagttaaattaggaagctttatttggctaaaattttgcattggtcttaatttgaatttgaaatatgaatttatatttaaaatccaattcatttgaaatatggatttgaaatccaaatccaatccatttaaatagatttggattggtgcaaaaggggtggtgaggtgcccttaggcaaaagaaattttttgtattttttaatttgttttttataatttgtgacaatttttaatcacaaataaattgtgttttgatttttttttatgttatttgtggagatttttaaccttcaaaaaattatattttcaaatttaaattaaaaaatatcccaacaaatttagattcgtctaaattaataaaaaaataacacatttttattttataaaaatgaaaaataattaattttttttttgcaagaaccaaaaatgaacttttgataattttatgaaataaaaaacatattttaaccaaagtaaaattcaccaaaaaaaataaaatttgagagtaaaaaatacaattaaatgacccgagttcctgagacaaaaacatatctgagctagaatctctctttccgctagtaaaagaaagaaagaaaagaaaaaattcaaatggtaaccacgaaatagcagcagcatacatatattcaaattaaaacccgctaaaaactgtaattgcttcttcgttttcttcttctgcagcttctcgcttctcgcttctctcagttcagtgcccagagtagaggctagagctcctttcagaagaccgaaacctagggttagtgttttcgttcttgtgcagactgcagagccatggaagccgcagtggtcgaccccggttccagcctcctcaaagccggtttcgcgattcccgatcaagctcccgccatggtacgaaatcaattctcaccccaaaatctcgttctccctttgcttctatttttcatttctcaacaaaaataaaagaaattgtgtccctaatttgggcttcttttgattcagataattcctacccaaatgaagcgaatgctcgatgatgggtcgatgacggataacccggcagtcgatgacgttgccgttgatccggtgtgcagaggttatgtcagtgattgggatgccatggaggatttgctgcattatgtattgtatactggctttggatgggaaatgggcaatgaaggacaaatactgttcacggatccactttgtactccaaaggtttgagcttagaagtttatgcttttagttgtcattaaggaaatttactgatttaacaatgtcctgttttgatgaccctattttcagcttgtttaggcttatatgctgcaataagcacttgttaactattagccctgttttgggtgattttttctttggcatggttacgtattaaagtttatgaaaataatcttttgtggtagccagttctatgatagttactttgaatttactctgttgaattgtccaaactccactcctacattagcatttctcgaagttattcctattcagcttattttagggcacttatacgtatgacaacagagcttatttaacaagctttatttgaataagtatttatataccttttttatcctatagggtcttaatgtgtatttggactctctagtgtaggtgtgtttgcccatatactcatccatttgcctccctagttactcaataaatctttattatatactctttgacaattttggtgccatctttttttgtacatatcagtgtattatttacgttttacataataagctgtctatctgatataatcgatcagccaatccttgaaaacaaaattgggggtaacaagtttgtagtattctttaattaaactttttctttaacagtttccttaacagatgtatatattattgttttccaggctaacaaggaacagttagtgcaactaatgtttgaaacattcaacatatcagggttttatgcttccgaacaagcagtgttgtcactatatgctgtaggacgtatctctggatgcacagttgatattggtcatggaaaaataggtatgcatatctgaaagaatgggaattcaagatttgtttgatttgtataaataaatattacatataaaaatggtttatttgatttgcttgctgtacgtcaagttgtctaatttgaaaatgtgggtgtatatgttattctgtcacatattcatgtgatattcgtgcaccaaggacaaggactctatgggtgactagacacatgttgtagttaaatctctgtattgctggagtaaaataaaaataatgttaagttgctttatcatgtgtcagtgatcaaataaattgccagagactttgtccatcagctcttgaaagccaaaaagagtcgaagggatgcttaaaaattgactattgtttgcaattgcatattcattttaccttgcctattccacatgccatcattatctgcatagctaagtgaaaagaattggatggcttcatgcttgggctctgtatttgttagatgtaacctaggtttcttgtgttgatttattggtagttccagtaaatcagttttttcctaatcttctgttttactaattgaattgaatggcttagttgaatgtttgaattttcctgagagaagtcatatcagcctcatggatttattctcccagattgcttacaattcaatatctagttttagggataaataccactgcaagtgcatatttgttaacatattctattgattcaagataaataacaatctctccctaaagcttacatgtggtaaacataagcttgttactatataagttacccttggccccacagagagattgagtaaagctgtttgctcgttgatctttagaattcactaatgaggtagtaatctagggaaagattcttttctcagatgaaatgacagtctattgatatgcatagttcactcttgaaagacaggcttggaggcaacatgcaaggtttcttgattgttgttgaaaatcagaattaatatgctgattatattaataattgcagtttataggatcataatctctgatttagaggaaacataacatcctctatttatgtacaattaatgtaattaacctatataaacattcacccgctgtgtactctaatacggttttcagttcattatacctctgttttctcctattttaacaatggtatctagagcctgcagaggtattacgaaaatatatatatatatatatatatatatatatatatatatatatatatatatatatatatatatatatatatatatatatatatatatatatatatatatatatatatatatatatatatatatatatataaacagcattgctttggttgagtgtctgtccctgaaattatcctataactgaaaaataattaggataaggttttataaaaaaacctcaggacaacaaactaataataattctgaaaaaaaacagaacagaggacgacatttctgaaaacgggaatttcaccgctaacataaacaaacataataaacagaatgaagaagaacatttgaaaagaggagaaaaagagagaaaaacagttcaggaaaaaaagaaagaaataaaccagagtatgtcagagcagagaaggtcgctggagtgtttgcacagagggaaggttttgtgccgctagggtttgagtgagtgtgagaagagttttgtattcgtagaaggaagggttagtctaggagtaacagttgtgtttcgggtcgggttgtttcgattgggctagcccgagcccaaaaaattcgagagaaaaaacacagaaaacccgccatgcctgctgtgaaccgccatgagtccgcaacgttatggccatggtggatgcctttatataagctagaataacacataacagattgcggaggccgccgttacaccttcgtaatgccgttaaggcactgccataaccgccatgtgacaacagttttttggttgaactcaatttttatattttttatttattagtgggaataaattttcttgtaacaaactgagagcatagtaagcttcagcttggtggggtgtgtttaaaatcagaattaatattctgattctattaataattgctgtttataggaacataatctctgatttagaggaaacataatatcctctaagtacaattaatgtaattaacctatataaacatgcacccgctgtgtactttgacacggttttcactcaattatccctctgtttctcctattttaacaattgcaataaatcaatttcgaagagcctattttgcaaaacttcaattcttgaagtagtttcaacctatttcacttatggtattttctatttatcaaactaaatttacaatttacaaacacaatactattataattaagggtattgtctttgatttaaaactatctatacatggtagaaacttggaagactagttcctctcctgatatgtttggtttagatctttgtttgagatggccattacattgaagctctaacaaatattatatgtgctattatataagtggatgagtagatagatggctgagtgtttctctttcaaaacgaacttgctgttgagcttactagttatgcacaatttgatctttttggcttgcctaatcagatattgcaccagtgattgagggtgctgttaaccacattgcctcaagaagatttgagtttggaggtattgatctaactaatttcctggctcaagaacttggcaaatccaatccgttagtgaatatcagcatctctgatgttgagaacataaaacagcaatactcgtgctgtgttgaagatgaattagcttatcagaagacccaaggttcctgccctgtggagacacatacccttcctgatggacaggtacacctattggttcctctatcaaataattattacccaatgcttgctcatttacttgttcctgatatatttgaccagttcttctatcaagtttgttttactatagatctgacaatcttagtgtgagttaaaattggttaaacaaatggaaaacaaacaaaaatgaaagggagggtgggttgaagaattggtaatgagagcagtgctcactttagaatcacgtagagttttctttcactatgatgcaaatgaactggatattttgattgaatccctctttaagttctcttaaagctttgtgctagaaaatttattttccaataggaggctgtttagcggtacttttattaattgatgttgaaagcttgctaggttgtcattagaagcggctttagaatataaggccatattaactgggattttttttgcattcagaatgttagaattgattgagtatagttatttaggttctattttagttggttgaagtctgaatgtcttgcaagtcacaagtcacaacattgtttattgtatacatcaataagaggataggagattatcattgaatatgttaaattgaagattatttcaggtctaaatatatttctactttagatggccgtaatctaatatggatgcattgcatacattatatcttagttcatagagacttgaagggttctgagaaatttgttgacaccattcctattttccaaaggaaagatgtggtgaatgagacaggaaacatctaaatttgtgctttgagctagtgtacgaagttattggtttcctacttgttgaatgttatgatcatagaggtggtggaaaggccatgaacctttcacaagggtgggcatggtatggtttaaatgtaaaagctgagccaaactgaaattatctgaaaaaaggttccagttaagatttaaggcataacagttatccagtttattttggtttagttaactagtataacctataagatgtggatgcaattactttctctagtagttaatagtttgaacctcatcaatcaacaaaaatgcgtttgaacgtattaaaatgttgtgaaaacaccgttgcccttctattaccataaaaatacagttgatgtgttccatgtaaggctgaatggctgaacaaagatgcaaggttgaatagttgtgatcgacagtgatgcaatacaactcaagaaggcaaggaggaacaacaaccctgcatggctcaacaaaatgcaaggctgagcctctggctctgagtcaatgattgaaacttgtaacagttgaactgcagtgatggcggctttgaatggttgaacaatgatagtgggggctttgaattgaaccaaggtggtaggggcttcaaacagttgaatgtggcggtggtagcttttaataggaatgatggctttatgccacttagcagaagttttttgcactatgaataagagaagtctagaagagttcagagatagggccgttgagttaaatgtaggaagatatactgttggaaagccaccttaattgcagtcacccctaacctgtcttaattgtggtcaccccccaaagctcaccttagttatggcatattagagttggttgccaatgtcttggaaagagctactgttaggagccatgaatcagaatgggaaagaaaagatagattttattgaatagtaagaaaacataggagagaaaactctcctcccaagggtttccccttcacaaaggatttctcctttcacaaagagctaatgctcaattacaaatgatccaaagctgaatctcccctatccttcccttatttatatctaataaacccctctaactaactaaccaactaacttattaatagtctaactatgttaactaactttcccttctccttatatcctaacaatacacccctcctaaaaatcaaccttgtcctcaaggttggaatttgaaaactgaaatatgatactcaagcttttgctcaaacttgcctttgtttttaactggatcttctatattttatgacttgatctaaccttgattgttgaattatgtgtaggtgattacaattggaagagaaagatatactgttggcgaagctttattccagccatgtctattgggtttggaggctcatggcattgttgagcagcttgtccatgctatttcaacggtgtcatctgaaaatcataggcaacttcttgaaaatactgtggtttgtggtggcacttcttctatgactggtaaaccgttatttcattagttctcatgaatctagtatatgggatcctttgttttttcattaatttgagtacaacagaactaaatattggactattatgttttctattgtcttcggtattaactaaacaaggtaaaatttggcaaggcaagagagagagagtgattgtcttcaggtgtgttatggctattttctaagacaagagtcacatatggcttctagagctcacaggaacaactacctagaagcaatatgatagggacttggggattatggggtgcctaagtccttcatcaagtagtatgggatgtttggtggagtaattaagtggctgggttctcccccctctacagctaacatttaagggagggttcccaaatgcttgggtgcttatcaattgttattagaggcttcaaccatgtctcttagctgcaaacaagtggtgcaggtggtgatgctggtattgcagtgttcgcctgggactagtcaaagggctagtgcacagccagccggcttgggtgttggggctgcggagtgtggtgggatgttaggatccaattgcaatccattggggcaagagctaacaagtgatttgggtagagcaggcaacaagctggaccacaagagttcagagttgggtaccgtgggagagctcaaaatctaatctcaaaccatggatcaagtaaccatacaaagccaataacatgaacttcagtagtagctctagttccttggcagtggtattagccaggggcaagacttcattaaagacatggagaacactcgtgactttgtccatattgtcattaaagtataatgattataatgtgttaatatatatatatatatatattaagtaaattacattaactacccaaaaggttttatgaaactacaaaaatttcccttgcttttatctactctacactactaactccccttaatttttgaaaaatgtaccctgacaccttgtacattacacaaccccccctataagggaggttactataaatgttaaaaaggtaggggtgtttgtgtttcatgaaaccccagaggtggtatatatatatatatatatatatatatatatatatatatatatatatatataatgctaactgttaaaatatcgaaatcttgtgtcttttcatcatgcaaaataaacattatatagaactaagggtattataataaaattcatttagtgctttctcgtactgatgtgtatcaaacaatgaacattgcaatttgttatgttgtgcgttcactaccaaatagtaggctgaacaaaccttgtcctgtgctgttctgcatgtattgttccttgatgtgcatcaatatactgtatactccactgttcagtgacttctttgcatttagttgcatatggaatttaggtttcctctgattaaccaggaaacctatgtttgttaagacatcaatttgttcagtatgttcatgacaagatgaggttatctcacagtaagctgatagctttttatgagaaagcttactcgtcaatgttggttcttacttcaggttttgaagagagatttcagaaggaatctagcctaagttcatctgctattcgacctaccctagtaaaggtaatcatgttgtcaagtaaataatgtaatacgcgtgtctgacagacattatatcattatatttatgttatcttggagtattttgctattgaaagaatttgttttattttgtggccattaatttttgaaatctggcgtgtatgataatgaaatatgggatcaaaatgcttgctgtccatggttttcttttattttgttattcagatgtttttttgttccccgagactctcccctgtttcctatctttgtggggatagagttgtgggctaatcgttataagagttcattgtcatcctatacttatgtatataaattattcatgtattaatttatgtttcctctgatgggccggtaatctgtcattttgcagcctccagaatacatgccagaaaatttaaccatgaattctgcatgggtgggaggtgccatacttgccaaagtagtttttcctcaaaatcagcatgtaaccaaggcagattatgatgaaactgggccttccattgttcaccggaaatgcttttgatgggattcatctgcacaatttcttcaaacaggacagttcctttacgcttgtattagtacatgtggtaggccttcatttgactcagattcaaaatgctaactcactagatgtttaggtacttgcatgtttttaaaaactgtagtggatctccattgactatatgcaatcatatttccttgctcaagtgtcaaggcaaccacaggtagatgatttcagtaaaacctggctctgacaaaatcatataatgtatgttacagcaacagcagcttgcttatctttgtaatgagcaagcctgcaccagattcagtttggtccccagtgacctctacctgtactgttgcacagattttctgcacctctcctgtaactaattattacactttgatttgcttgtattttgttcttcatcgataacatttcttaatcagttatggtgaa

SEQ ID NO: 42 - DNA, 17263 bp, Glycine max
  source 1..17263: mol_type = genomic DNA
tgggcttatctaagtatcgtagcccttaccataccctaattttttctttcttcaaatcgcgcgcgctccttacttcgagtcttcgactttcctcctccgaccatctcgccggaatttcccgcggcggcgctccttgtcgccgcagcttctctctctactgaaaccctagagagagaaaattcaaaaaccattctctactctgaaattcataaaccctgaaattcaaaaaccctaattcccctgtcaagctcgtagcacagtcacagccatgtatggcggtggtgagtatcaaaaccatttccccttctcattctctttcttttgcttctgagatgtgaaatcaattttctccctttggttgaatccacagatgaagtatcagctatagtagttgacttgggttcacacacttgtaaagctggttatgctggtgaagatgctcccaaggccgtgtttccctctgtaagagttttccctactctttttacttttctaaagttttggatttgttgctgtgtttactgttttgctgatattattttaccatttattggcctatagagtaagaaatgttgttatgctctcagttaatagtgaagaggacactgacatttttctgtggtgataggctaactagtactgcttgatagtgaaattatgtatttttataatttatagttgactagaataatttctggaaattgtatgggtagtttgattgtagataatgaattggtggttgtcttggcttgtgcgaacttaggttgtgggagcaattgatcaaatggatgttgatgaagcagataatggcgaaaacaactctgcctctgctccggaatcaaataataatgttagaaatgctgattctgacaagaccaagggaaagaggaaattgtatgtaggatcccagtccttggggtaccgtagagaccatatggaggtaacccttatgtaatggtttttgtgattggacttggattcgtaatttacagacttttttgttccttaaaataatgaatagtgtagttattttcttcttctgcactgtcaggtgctgtctccgtttaaagacgggattgttgctgactgggatattgttgacagcatatgggatcacgccttcaggtcagtactgactttctaatctgtatgtgatatgtattgtaggattattgttttcctttttgcacttgtttattgttagactatagatatgatagagcaattagatgcaagttgttacaatttaaattcaagttatagataatttagtagataattttgagattgttatttctctatactctatatatatttcttgcacactcacaattagttatgaataatatcctacttattccattctttcaatatggtatcatagagccagaagcttttttttttggaaggcaaaaatagtattattaaaataagtaatcagtaccagaggtacttaataaagtaatacaagacacctatggtgccaccttccaaaagcaaatcccaacaaacataaaacccagcaggcccctaacaagaaggaaaacaaaattaaccaaaagcctcctgtagattggtagaccagtgattaaattgggtattgaaacctttgactctagcttttaaccaagaccaggcaaggaatagagcctcatccatcactctatgaggatcaaaaggggtccccttgaaaagcaatgaattcctgtgttgccaaatggtaagagttaaggctatccaccacccacacaccctgctgtacttactccctgcaccaaatccattgcagaattggataaaatgactggccggatcagctgagagagcaccaatagcccggatccatttcatggattccccccacattccccttgtcatcttgcagtggaaaaacaaatgcccagcctcctcctgatgagtttcacaaagagggcatagggtgtcctgaatgtgaacatttctcctgagaaggttggccctggttggaagcctatccaaacataacctccaagagaacactgcagccctcggggggattttgagcttccacaaattctggagaatgtctctgtgaggaacagggctgctggaagacatcaggagcctataggctgacttagtagagtagagaccattaggttcagctttccaaaccatagagtcctgcacatgttgctgaataggtataactgagatgtcatccatgaaggctattgctaagtcattctcatggtcgaacaggttcctcctccacttaagatcccaaatccaagaattttgagaaaacttccctattttagagatagagagatgttgttgcctgctgatgaggaaaagaggattgtacttttgttgaagattacacccctcacccaaccaggtatcctgccaaaatttgatttgatccccacagccaaccttccacaccatgtactggtggatgatgttagaatcaggctgatgatagagcttcctaagatccttccaccattgggactgccaccctttatctctgccccatttcagatctgaccaacctccatatttggatataagaaccctgccccacagctgattgtggttagaagcaaggtcccaaatccacttacccctcagagctgcattaaaactagacagattctttattcccaggcccccttcactctttggtaagcaaaccacctcccactttacccaagaaatcttcttatgatgatggttacccccccacagaaaattcctttggagagacactagcttatcaacaatgctttggggtatcttaaagaaagataagagatatataggaagagcattcaggacagactttatcaaggtaatcctgccacccattgatagatttttctgattccatttcgatagcttggcttcaaacttattaatcaaaggttcccacaccatcctactggaaggtttaactccaataggcatgcccaggtacttgaaaggggtgtccatgtgcctacagttcagaaaagcagctgcctgcctggacccaattaacctgcatcccaacagccccaaaatggcttttggcataattaatcttcaatcccgaggccatttcgaagcctctaagcatagatttcagagcaaggacattatcccaagaggcttcaccaagaaagactgtgtcatcagcatattgcaagatatttataggcacattctgcttcccaaccagaaaactcctatagagatttttattaagagcttctctcatcataccggtgagaccctcagccactatattaaagagcaaaggggctagaggatccccttgcctcaaacctctagaagggacaaattccttagaagggctcctatttattaggacagagattgtggctgattgaaggcaggctgaaatccacttcctccattgcatgcagaaacctaatctttgcagcatatagtccaaaaaagcccaagatactgaatcataggctttttcaaaatccactttaaagatcatagcagacttgtctctcttaatagcttcatctatcacttcattaaggatcacaattccatgaaggatatgcctgttttttatgaaggctgattgcctttcgtcaattagacttggcaacactagcttcaatctgtttgccaataatttagcaactattttatacatgcaaccaatgagagaaatgggcctatagtcatttagggactgaggttgagatatcttggggattagggccacaaaagaggcattgcttccactagggaaggatccatgagcatggaattcatccacaaatctcctgaaatcaggtttaagcagcccccagaactccttaataaaattaaaattgaaaccatcaggccccggacatttatctccatcacaaccccaaacagcttctttaatttctaaatcagtgaaaggaccagtcagcccctgtgattgattctgatcaatagtgggaaaacaaaccccatccaaagtgggtctagaagggttctgttcagtgaacctctgaataaaaaagttagcagcttcattcttaacaagatcaggctgctgcacccaagcgccatcaataagaaaaccatggacagcatttgagcttcttctgaagtttataatcttatgaaaataggctgagttactatcaccttccttgatccacttagccctggacttttgcctcaaaagggattcataagcagtggaagtatcccatagctcttgttgcaatgctctcttggctttaacttcaagatcagatagagttctattggaagctaaggtttccaattcacacaatttctgcttcaggttctgaattctgatagctttaatgtcccccttatccttacaccactactttattgagaatcttagattcctcaacttgtttttaagggcaacagctccccacccaatctgctggtctgcactccaagcctcttctttatttttttgtttcttcatggtcacctaccattgcttccaatctatccattaaatgtagcctctgccaattatcaaatggctcatctccttgaagtcagaacttcttggtggctatataacaaggatcatatcatgtgtcctccatccgaaatcattcatgatggttaagccttcttgcttctgcctttttaggtggttaaatcattttgcttctgcctttcaggtggttaggccatttttttttcttctgccttataggtgattaagcaattttttgcttctgtctttttaggtggttaagccattttgcttttgccttttaagctggttaagccttttttgcttctgtcttatggtggtttagcctgtttgcttctcttaagagaggttaagccttgtgttatgacttctgcttaatagttaagtttgcatttgttggctttgagcaatgtgcggactttctccccaaagatcttacattttcgcgtcacaattttatgaacaaaattggcattgtctttgccaccatcttgtgggagtgtgttagactattgatatgatagagtaattacagttaaaactctataaattaataatgtcaggaccggagaaatttattaatttagagagttattaatttatcgataaattaataattattaatttaaagagtttttaagtaattatactgtacataccaaactttatgatacaatacaaaaatacaacacctgagctattggatgcaataagaaaagttagagatgagctccaaatagacttgaactttaaaggaaaacagacaactattgaatcatatttcaatagagtgtaatatattttttttagtttctatgaattattaatttatgattttcttgggaccgaaaattataaagggatttcacgaaaaattattatcttattattttattgagtttttcaattttttacattggcccaagtcgggaccggacaaatttattattttagagagtttattaatttaccgagtattaatttaaagagtttctactgtagttgcaagttgttacaatttaaattcaagttatagataattttgagtttgttattcctttgtactctatatatctcttgtatactcacaattagatatgaatgaaatcctaattattccattttctcaatatttattttatggtgtatatggctagcatttgataaagctcgcgtgattccttttttttttgtttattaaaatcccttgatgactgatgattcttctcaaaagcaatggtccaaagaatagtttacctgttacctgtatctaaagcacagaaatacatgagaaattctggtagtaatggtgtctaattaatgtttgatagtaatcagtaatgaagattattttttccaaacatcaatgcctcaatggtccataccataaatgtttatcaagtttttttgatagttatgaactttcttttcttttacattggctgttcagggccttgctcaacccttctctttcaagtttcaagtaagaattaggaacattgcacgaacacagggatagttagcaagtgttgagtagcaatattttgcatgtgaaaattggggatcacatcatagttgctcctaccacaattgcacattttaggttttttttaatctttcttacaaaataatggaggagattgagggggacgaaagcatatgaatcaaactaagtgaactagcatatagataattaaggtcacaatcgagcttaaaagaaaattctacaagatagctataatatcagtgatgctttgtatggtagtgaatgctggacatcaaagtgcagaagagatttgataagtacagtagagatgataagttgaggtggatgagcggatttgcaaagaaaggaaagataagatcaagaacaaagatatacaggaaagagttggagtagcaccaccgaggagaataaaaactcacttagaatggtttggtcatgtgagaagatcaacaaaggttccagcaagaaaactataatgcaatgaaaagggtagaggaaccattaaaaagacctcacactaaatggatttgtggaaaactgtttttgatatagctctctttatatttttttatccatgtaactaaccctacctagtggagtaagtgcattagtttctggttttgaccattcttccattgtatttttttatgttttttttattttatattccttaggaattgttttatttgtcactgggcacacattcttttttatttggtagggaatgactattgattgggtgtgctttctttttttggtagggaatgcctattgattgatcctaaagagcatcctatgcttcttgcagagccttcttctaactctcaacaacagagagaaaggtattttggttattgtctataattaatagagctcagtttaaagcatcatatgtatgattcggttttttaattttttcaggacagcagagctgatgtttgagaagtacaaagcacctgcattgtttttggcgaagaatgctgttagtccttcactgatctacacctttaaaaataatatatgtcatggagtgaggatgaaaaactactgatgggttctgacttgtcttgacatacaggttctgacttcttttgcatcagggcgtgctacgtcattagttgttgatgggtaagagacaatgatgttactgaatggtagttttgttcttattctgcagtagtatcaatatgaacaaagaacattgatctttctcttcgtttctgtataggtgtatatcaattgcttaccttttaagatattatatatggaagacctatgccgtagttgtcttgtttaattataccttacattcttactttttccaattatagtaggagaatgataggaatttggaattagagaacagataatggagatcaatctcctaacaagcagaggtagctctctgttgagacttgagactgaaatcaaagaaagaaaataatggggaattatgcagactcagagaatatccacccctcctaaaacctctcgacctttaaattcttgcctatttctttaaaattctcccctctcactttatccttacatccaaccctcttttttcctcactcaatgccgtacaatgcaatcagtctcagccagggttgttacagtccaaattcctctttagcccctgctcccttataccatcctcaatgtagtagtcatatactcgtataaagcctcatagagggcattagactttgctttagtagcaggataagggaaatttaactgcaaccaatggatcaaagcgaatgacacataataagattatacttttttatttcagttctggaatagaaagtcttacaattataacagttaacagcgagaaataaaatatcaggaggctttttacttattctgaaacattgttaaataaattagtaaactgtgtaccttaagttggggaataacaatctgaaagtttctttagtaaagattgtatatatatgttaacatgtctaaagattgttgttttcctgcttgaccattttaaactgggtttggtaataagaaattagacattggcaatgttccattccaaaaagtggaatgggttaagcagcattttgaatacatcggaggaggctgatatggataaaagttgaatttctactatttaagacaaacacagtggattgggtatttgggtggacctttaagcatatgagattaagaattcaattgaaaaaactgaaaaggggagagagaaatagttcacttttaaagttcaatatttgttattacttctaatatgtcccaataacatgccagacattgctgataagatgttttcttcattattccattgttttcagtggtggaggatcaattacagttgcaccagtacatgatggttatgttcttcaaaaggtacatgatccatattatgattgattgtttgccaatttattatatttgactttaatgctgttttaggaatctgcattgatccaatttcttgtatgcaccactctgattatagataaatttgaaatgatgagattgtttgattaacaatgagcaaaaatcttgacaaataacctggtagtagagtcttctgattatgtaattgctatttttgtctattagtaatttttggttgtgtagccaactgcaaaagcaattatgtaggctatcatctctatattattactcaattgttagattgtgttttacaaaaatacaactaataattcgaaattgtacgagagtggctatgtgcgtgtgaggtactattgcttgcctaggtatttactaactaatatttcttcatctatgctctgcatattcgtaatatcttccattctgttttctatgtatctatgttgtcaatcgcggatgtcgcggccgctattgcggcggagcggagcggcgcggcccccatctgcgacggggatggacgtagtggcgcgggatctggaccggatttttgcgctgctacactgaagccgtggaaattccgaaaaccctagcgcgttgctgctctgcacacctgcgaggctgcgacaccccggcgaggctgcgacaccggcgagcgccaacacctcctccacgcccaggagcacgctgcgagcctgcgacactgttcgtacctttctttcccaaagtgagtgaaaaagtgagtggtgttgtgtggagcttgtaggttggtgtgaagtcgatgtcgcaggaaattagctggctgctactatgtatgcccacgagctaggttgaaaacatagggataagaaaggaaaaatagaaaagaaaagaaccacattttttaggtatatatgtaagtagggggaacatagggataagaaggaaaaatagaaaagaaccaaagagaaagtaacaatgtacgtgaagctaaacaatattaatatataataaattgtaggcaaacaatattaatatataataataatgttaataattaaataatatagaaataatattaaataaatataataatatcataattttataatattaaaaacttatatatatatatatatttctgtttttgaacatatatatatatatatatatatattattaattatttaacatatataaaaaaaaacattagaatagcggtcatcccgctatctgctatcccactatcccacttttggggtcggccgctccactccgctacgccggtattgacaactatgctatgtatgtgaatgccgcatacacacacatatcaaattaatttaagatctcattgaactcagcatttatatttgagttttggctaataccatgggtctttctgtctgctcatattttcttctatgtttacaacttaaggctgtggctacctctccaattggaggagaatttcttacagactgcttgatgaaaagcttggaaagcaagggtattacggtgggtgacaaacattagtcattatttttatcagtgatcttctgaaataaaggtactgtgattttatctgcctgagatttccccccttttaattgccacagataaaaccaaggtattcctttaggagaaaggaaatacgtcctggagagtttcaggtataatttgttttcattttaacgacctgtgagtaacaattttttaattccattatcttgcaatcattaaagtgtgaggcaccagacttgttttttttctgttgttttcattaaactttgaacatggccaggatgaggttccatcccatgtgtattatatgtactgtttgtgcctccaggatttctggatggtttcagtacttcatttttctcatctcttttaattgagtgttcttgaatccttttcagtcatggataaaattcgataaaaattgcatgtgccagtatactgctgctagtgacatgagctgaataatttacctcttgtttgatctactagaattaggttatgtactaaatgtttgtgcaatttagcaaattcattttaaacttaagatatcaaacagagaatggtgttatcctgttaggtatataattaaggatcagaacaaagaagatggagtgaggtgtagttatcttactttgtttatttcaattacatatataaccttgcatctgttgttgtagaattttggtggcaaatgatagtgagcaaaattgcccagtgtttctctttattactagctctaaaatttagtttcttgcatgtatctttctatatgattttggttgtaactgcaattctatgcttaaataattattatttctcattatcattttttttttctgaatcttacagacagtagatcttgagtttccaaatacaactgaaagctacaaactctattgccaggtttgtgaatgaccatgtaatatctcattacttgttgcttttcgtttatctgatgactgttcttcatgacagagggtgattgctagtgatatcaaggaatgtgtgtgtcgtgctccagatactccatatgatggtttgtttacctcctgttgtcatctcgcataatgtttcgaatcttactggtcctgtgcttttgttcgaatcttattggttctgtgtttcattttgttcttttgaaggaatgtggaaaatgttcctagtttttatggtgacaactttatttcttttgagctcctttctctctgtatacatcttagataactatatatgtgatgttattttctaaaccgatctctgctttcactctggtcatatatgatttttttttccaatcatctggtttagtgataaacttgtacaagtctttcagttagctcgttatagctctagaagatggctttgccttcttggttccaatagaattgcagtttctgtacattaaatctattttttcccctttttctgacagagagtgcatattctaacatcccaatgacctcatatgagcttcctgatggccagtaagttgatgttattcttgttcattgaaatagggaggaggatggaatgaataatgtttcatcttcaaaatatattttttcatttcatatgctactatatgtacttcatagcctaattgttgctgctggtttttctgtaatttattgtctgttgttgttttgttatgtgtttgtttttattatgcaggacaattgaaattggagctgacagatttaagattccagatgttcttttcaatccgtccctggttcaggtgtgtggcttgcattcaaagatgtgattggtttatcttgtttcttcaacgtaaaagattataatttataatattgcatgatatttaaaatatgccaaagcttcttgcaaggtattaaaagtaaaaaaggtgcccttaatgtactaaggactcctagcgccttgaggtgaggtgccaaaagacatgcctcactgaagattggtgttaataattgaaagacagtaaaacaaaatacttgctataccacaatcacatccgtgttccacccttttatactatgaatgaagaaaaaacaatacaaatttcatcaatcgagatgtttttggttaaaaaatgataaattttagttgttaattattaattaaaaagctgttaaaaagcacagcttgtgacatgaacaaaaacgaatataggctataaatatatagaataaaaactaaattattgaagtgtttccagtgaaattttctgggtggtggttgtttttgtgtgcaatatggctggtccatttttttttgtgcttctattttgttatgcagttctttaaattacttgagagtcaatattcctgtttttttattctatgtactaattttcttatttgtgtcaaatgataattacagtcaattcctggcacagagagctttgcagaaattgctccttcagttcgtggcctgcctcaaatggtaatttaacttgatgtgaatctgttttaagtatctaacttgctattgctgattgttttatcattttgcaggtgattgaaagcattaataagtgtgatgtagacattcgaagagagttgtttagtagtatactggtaaagttgatttatctttgccttctttctacacactcactcaagtagttcttatgtagagcttaatttagtttaccacagacatttttgttgtaaaaaggaaaaagatacaggggcattctttatatggagaatttttagagttatttttgagattgggttgcgtgcgcggggggtagtgttgctgaagttgtaatttcatgatgttaacttaatattttcatcttggttggaattctattttagttgtatttgaggcaagtgaccttttccctagaactttgatcaacatatatttgctgaaaccatatgctgtacatttattatgtatagttaataatcaattgataggttatgaagcatttcatatcaatgcatcatttcctggtaaattaaaattgatttcatttatcccatgcagcttgctggtggcacagcttcaatgcaacagctaaaggaacgccttgagaaagacttgctagaggtatattttaacaaatgagtccttgtctatttcatccactgaatggcaatatggttgttggtgctgagttcaaatacctttgaagcttatgttgttttaacatgtgatttcaaggggtagctttcatttttctttcaagtgaatttagttggtgcctcatcccaaatatcagtagtttggacaatttttactttgttgactgccattaatacagccttgttggggacttgtttcttatcttacgtgcagcagtgctacagagttttcttaaatcccatgactccgaattttcactatctaattttggagggatgggagtttgggagattgagtgtaagaatttacagcaaggacttgtgcatataacaacaagaatttttgaaattgtgcatgtgtataaattttttaatttgtagccaaaggttttagtcttgtcatttttgtagattagaattaaatatatttggcgtctctagaaggcttgtttagtttttgctgtttttttttcctgcttcttgttacttccagatataattttgaagaaaaatctcgtatggtttcctttgggtgtttctttgatggaacttgcattaggcattggagaaatcttttgtgctaaaatattatatatatatatatatatattcttcttctatggttgcttttgggaagaaattgtgtgtgatattgtaaattatttttttttactgaattatattaacaattaaaaaagttatatagttgtaaagtacaatggtccgtctgtaagattgtgctcaaactactggactataagcatttagccaaagcttctgcaggctggcacctctgattagagaagataattaagttgaaaacatttatcaaaatttcttaggaatcagatttgagtttataatattataaaaacatgtgattgcctggaaaggttaattgtagttgtaaatattgactacaaatttccgttgcaggagtcccctcaagctgccagagtaaaagtattagccagcggaaatgctactgaaagaaggtttaggtgtgttatctatcttatgtcaatgcatctaatcagaggtttaggtgtgttttcttttaatgctaggtttggaaaacctttctaaagcttccccctcttttgcaaacctctgattataattccatttctctccaaaataagagagaccgagattaacattatatgtgggagtagtaattgttgatgcattgtacatactgtatgttctagttctaactcaaaatgaatgactttatatgcagtgtttggattgggggtagtatattggcatcacttggctccttccagcaaatgtggttctccaaatccgagtaattataaactgttcaccaaacttgcgattatactagttcattaatgttaatatatatttcactttgcctatcttgtttctcccttttctcataaaagctacactgccaaatcgggctttcaaacaacaacaacgccttatcccactaggtggggtcggctacatggatcaacttccgccataatgttctatcaagtaccatacttctatccaaaccattaatttcgagatcctttttgataacctctcttatagtctttttgggtcttcctctgcctcgaattgtttgtcttctctccatctggtctactcttctcactacagagtctaccggtcttctctctacatgcccaaaccacctaagtctattttccaccatcttctctacaataggcgctactccaaccctctctctaatagcttcgtttctaattttatcctgtcgagtcttaccacacatccaccgcaacatcctcatctccgctacacctactttattctcatgttggctcttgaccgcccaacattctgttccgtacaaaatcgccggtcttaccgcagtccgataaaactttccctttagcttgatcggtacctttgcatcacataacacccccgatgcttttctccatttcatccatcctgcttgaatgcgatgattcacatccccttcactttccccatcatcctgtattacagacccaagatatttaaaccgtgtgacttgagggataatatggtctcctattttcacctctgagttagaaaccctccttcttttgttgaacttacattccatatactccgatttgcttctgcttaggcgaaagccatgtgtttctagagctcgtctccaagtttccaacctctcattcaactcctccctcgactctccaatgaggactatgtcatctgcaaaaagcatgcatctcggcgctatctcttggatttgtttcgtgaggacatccagaattaaggtaaaaaggtaggggctaagggttgacccttgatgtaaaccaattgtgatgggaaaatcgtctgactctccaccctgtgtcctaacactagtcgataccctatcatacatatcttggatagctcgaatatatgcaaccctaacccctttcttctttagagctttccacaaaatctctctaggcactctatcatacgctttctccaagtcaataaaaatcaagtgcaagtcttgttgggccatgcgatattgctccatcacccgccgtaataaataaatcgcttccatggtcgaccttcccggcatgaaaccaaattgattctcagtaacttgagtctcctttcttaatctccgttcgatcactctttcccataatttcatggtatgactcatgagcttgattcccctataatttgcacaattttgtatatcccccttgttcttatagattggcattaacgtgcttctcctccattcctccggcatgcgttttgacctcataatttcgttaaagagttcggtgagccactcaagacctctatctccaagagttttccacacttcaataggtatgttgtctggccccaccgccttaccattactcattcttttcaacgcttcctttacttcctgtttctgaatccgacgatagtacttatagttccggtcctcttctcttgtgtctagactgctagagtcatatccatatccatcattaaataagttgtggaaatacgccttccacctttccttgatatctttttcatgcactaagactttgccttcttcatccttaatacactttacttgatccaaatctctagtcttcctctctctacccttagcaagcctatatatagatctttctccgtccctggttcctagagcttggtatagtccgtcaaaagcttgggctcttgcctcactcaccgcctttttggtttcatttctagctatcttatacttatcccaagtttcagaatttctacacctagaccactccttgaaacactccttttttactctaactttgctctgaacattttcattccaccaccacgattctttacccctaggtccaaaacctctagattcacccaacgtctctttagccactttaataatctcttgggacatcttgttccacatatcatttgcacttccttgtgattgtccacaccaattctcccatatcttttgttggaagattccttgtttctcacccttcaagtgccaccatttgatccttggtgctaccagaggacttcttctctttgccctatctctaattcttacatccataaccaaaactctatgttgggtagtcaagctctctcccgggataactttacagttcaagcaatacttcctatcagacttcctgataaggaagaaatctatctgagaacatgtccctccacttttgtaggtgataagatgttcctctcttttcttaaaccatgtattggctatagaaagatccaaagcctccgaaaactccaagatggatttaccctccccattcatctctcctaggccaaaacccccatgcaccccctcaaaacctctagccacgctacctacatgtccattgagattccctcctaggaaaactttctctccttggggtatatcctgaagtaccccaaatcgggctttcattaaggataattttacactgaatcattttaatgcatttctgataggtatgaagagcatggagcttcatatatccaaaggaagtgtccatgagctgctgttggtacttgtacaagtttattttactgccatttatcaggaagtactatgaacgctgatgtagtgattgtctactaatggatttttatttcctatttaatagccatttccattagatcccaattctaactaaattattggcctcgagatgaatcacagcccacctttaactaatcttgtaatgatgtaaagtgtgcctagagtctgtaacaattgccccatttatcaaattagatctctcctgtgta

SEQ ID NO: 43 - DNA, 19368 bp, Glycine max; identical to SEQ ID NO: 19
  source 1..19368: mol_type = genomic DNA

SEQ ID NO: 44 - DNA, 6744 bp, Glycine max
  source 1..6744: mol_type = genomic DNA
ccatgttggattgtttccgacagatctgaagggcccaaagcaaactgtgatatgaaacccgccatcaacggaaacacgaaaagaagcccttgttctttctgcactcttgagtccttcccaagctcgtttcgttggaaattggaattcattctctccccgagtcagagtcatgtatggcggtggtaagtgttctgttcactatgtctatgtatgccctctaatttctgattattttcgtttctgttgcaattttatttaatttggcagacgaagtatcagcaatagtgatagacctgggttcccacacttgcaaagccggttacgctggcgaagatgctcccaaggccgtctttccctctgtaactctctctcattcgcctctttttaactgcattttattctttgtattgtaagagatatctggaacatacattgtcacatacttaggttgttggtgcaattgatcaaatggacattgatggaactgctgatattaatgatgagaactctgacaaaaccaagggaaaatgcaaactttatgtaggatctcagtcactaggataccgcagagaccatatggaggtaacacttccaaatatctatctgctaggttaggctttaaattttaatctcatttcagttattttaaaattatttgttttgatgttgatcaggtgctgtcacccttgaagaatggagttgttgttgactggaatattgtagataacatatgggatcatgctttgaggttggttctcattactgaatctggctataataggatcatcattttcttttcttcttcttcttggtcataaacgggatcaccattttcttgatatagcatgtgcggttgtcaattgttaaggttcctacttcttaggaagctcatgatggttctttttatatgcagtggtcccaaaaattagtcaactactgtatagagagtaaaaagagaatactcatgtggtcgagatatcatgttgtttatgcaaacctctctttatgtttactaatttgtgttgtatgtatgatagtgttttccattcttgtgtcaaatatcattctcttaggagtttctgctaatttatttatctgtctatgctttatgctactattcactgtcattggttttcagggaatgcctcctagtcgaccctaaagaacgtccaatgctacttgccgaaccatgctccaacactcaagaacagagagaaaggtattctgtcaacaataaccccccctccttctcatttaagtttttgggttttaggctttttgctgtatacactattatattatttcatgtttgtttagtaataaagtttggttcaacttttagatttcattttctttttcctatgtatcagggcagcagaacttatgtttgaaaaatataaagtaccagcgttgtttttggcgaagaatgctgtaagttgtatgatctttactgctgggtccatatcttactatcaagttgcaacaaaagaattagtgataaaaaaatgtattttatattgatgccatgaatttgtgaactagttaatgaaggagtattttgtggcaccaggttctcacatcttttgcatcagggcgtgctacctcattagttgttgataggtacgagactttgaagttgttgacaaacagtttggttctgtgttgatattaatgtgcaatacaattgccaaattgcgtacttatgaatttggtttggtagatatactgcaatacatttgtcttccttttctttccagcatgcaactaaatagttgttgtcactttactttttaatatttcatttattgattttagttgatatgctacattacaatactacatttttgacgagtagttttgttcattatttcaaaactcagtggtggtggatcaactactgttgtaccagtactggatggttatgttcttcaaaaggtattgcttgctgtcctgtcaaagggaaataatatattagaggacttggtccattttttaagcatgcttattatatttagttttttaagactctaattttattattttgcttgcactactgttccaaaacatgcttcttcattaaaaattatcactagtgggttatggtttcaagtaagtcaatgatatatttcttaaagatatttaatatgacctgtgataaattatctgatctttctttgtaaaaaatataacataattaaattgtgaaataaagactaagtagtaaatataaaatttgtggaaagcactaatgtaaattggtgactttgaaacattggtatgcaagttcaatagtttcatttcatcacttcatggatgactccatatcaatatattaatatttcgttatctgtctgtggttgatgttttacattctgtttccttgatatataatttagaagaatttttattatattgtacttgtagccttgtgtttgtcgttaaggtttattcaagtttcctgtgtctgcttatgtctttacttatgtctacaataggctgtgatagcttctcctattggaggagagtttctgacagattgcttgatgaaaagtttggaaggcaaaggtatcacagtgagtgacatacattagctattttcttcttttttttcaagggtcatcttagtaaagtagctatatttatatttgctttatttgtttgttattgaagataagacctcgatgttcattcaagaaaaaggaaatacatcctggaaatcttcaggtatcttataatttcattgtaatttgcaactattgtcagtagtacctcctttttggctagttgagggtgtgggggaggtgggtgccaacatagttgggatgtatctcctttttcacgactgcttctatccttttcgggaaaaaaaagaacaaaacaaaaaaaactattgtcagtagtatatcttgtttcttcttattttgctcaatccttggtgctttttcccttgagtttttgaaaagtttgggatgtcgggtgtcaaccttggaatgctatgttccactgttcctcttgatcttgaactttattgatcaattagttgttcaaatttgataagaagggcactattggttgcggtacattgctgggatgataaatgtacatcctgtttgcttacttgcttgcttgctcatatctaattctaattctatgaaatcacaaatgttattcagtttcatgctgttacatttagcatgatttaaagaaatactgcagtcaaatgcacaaatggagagtgatctttgttacctctgttttttctgattcccacagactgtagaccttgattttccacatacaacagaaagctacaaactctactcccaggtctgtattttgccctaaattttcttttcatgtcatgtctccattccatgctgactatttattgtgacagagggtgattgctagtgacatcaaggaatgtgtttgccgaacaccagattctccatatgatggtttgtgtccctgatgtagtttcatataatgttgagtcttggtctagttcattatattctttatgggacatatacagacaaatgccttacctatggtggcacttttttattttattttatgcattgacatcttggatggtaatatcttgcttgaaaatcacatgttattccattcttcaatgattgatattaacatcgtaaaaaaaattgattgatattaactgttgctctattatcatattatttcataatgagtgaaagtttttctttttcttttaatttatgggagcggtgtatgagtttaattagattataataatttagcttttataacatattagggtaattattatataaatagtacactgatgtgattgcttgcaactgtagggtttaaacagcttacacagttctatcagaagttatacatacgttgacttgatttgtcatgtttcctttgacattatttgtggcagttgctctctactctatatttccatatagattagctcacttgctcatgatttttcaatgttttgatgtattgagggcattgtttaaggaagcaaaagtagaaaatattttttgaaaaagaagacatttattatatcataaaagtaatttaattttttaagtaattagaagcatttattaatgcatataaacttctctttaactagtgcccttagggatcatgttaatgggactcatattttataactcaatgatgcttttactttcctggttacattcaagttcattattatcagattccatatatgacatgatatccattattattacttttccattgcagagagagtatattctaacattcctatgactccgtacgagcttcctgatggccagtaagtccatctttacttgtattgaaatactgaggatttgttgaattatttgaatggtcttcaaaccaatcttcttccattcttgtctttgttatgttctgtgtatctacaaatatctttgtagatttgaggcatcttttttctggtttacttgcgataatcatttaactttgatgtcatggatgtcacaggattattgaagttggatctgacagattcaagattcctgatattctttttaatccattattggttcaggtatttgtattttgttcaataagtgtgattttttaatggtgttctgtgcttatactgttcagttcagtcaaaattccagtttgcatcctgttcctcacaaatttaactgctttaatgtaaatcacagacaatccctggtatggagagttttgcagaaattgctccttcaattcgtggtcttccaaaaatggtatttttttaatgtaaatttaaatgcattctttctacatattctagacttcaaattttcttctattgctcattattttggatatgtgcagattatagagagcattaataagtgtgatgtggacattcgtagggaactatttagtaccatactggtaactttgacaccccccccnnnnnnnnnnnnnnnnnnnnnnnnnnnnnnnnnnnnnnnnnnnnnnnnnnnnnnnnnnnnnnnnnnnnnnnnnnnnnnnnnnnnnnnnnnnnnnnnnnnnnnnnnnnnnnnnnnnnnnnnnnnnnnnnnnnnnnnnnnnnnnnnnnnnnnnnnnnnnnnnnnnnnnnnnnnnnnnnnnnnnnnnnnnnnnnnnnnnnnnnnnnnnnnnnnctcctctctgagtttaaaggtaattgaacataattgaaactgaatctgtttatctcacagcttactggtggtacagcttcaatgcaccaattgaaggaacgcattgagaaagacttgctagaggtgaaactcacagttgcacatattttattcgctgaatgccaattttctggatagcataaatttatgggttgttttccttttaaatatccaatttttgtactcttccagtcctcctttctattctaataaatttccctttccctacatgccatcacgatcatatataggaagacacaatccacagacagaagattgtgggaaacttgaaaagcttagtagagaatcagtaattgtaaagtctagttattgcaaggagggttaaaactaggaggaacacaaccttttgtgttgtgtggaaattggcacacatttataagataccctcagagatcagtatgagatgatttgttatttacttgtcagatatgcttgaatgaagtttttgggttgtaggcaattgtgttcatatatgaaaaaaattgtttgagatgtgatttctgtttgtaggagtcccctcaagctgctagagtaaaagtatttgtcagtggaaatgcaactgaaagaaggttcaggtgggatgttcatctctctctgtctctgtctctggtccattgtctgtgatcatattatgatgagttggttcatgttgcaacatctgctctagttctccctcctttcttcataactcaagtgatttttattttagcaatgcaatgcaactcaagatgatgtagtatgatttttaagtggttgttgtttaatcatggtggtaactctatttgcagtgtttggataggggggagtatactggcttctcttggctccttccagcagatgtggttctccaagtccgagtaagtgctgattgattgcaaaaaaactgttattcaagttcattcaccttcatgaaaactaaactaaaaatactgaactcaagtgaataattttttaacacaaagctatttcactgtgctatggataggtatgaagagcaaggtgcttcttatatccaaaggaagtgcccttgagttttctaacggatgtgaatacttgtgtttattttcttaccattattgggaacccgggagtttcaggaagtccaatgttgaccactaaattagtgcccttgccatcaatgacctgtttcgaagtcatgccattctcatcagtgttttactaggcggttataactattgtctagattgatatattgacagcttctttatctgctgtcgaggttgatataactatactgtctgtaattggcacgagctcattttcttattctgcatcacactgcatgactgcatccccttcccatatagtgtaacgaagtctaagttaattcctgttaagtctggatagtgaatagctagctattggcgttgctgcaccctattgtgcttattgatgccaatagtgttagtgttcgaggcattagttggtgacactttaacaaagctaaatgacgttgtaccgtagtttggttgaggcaaatgcatgctacaagggcgacggctaa

SEQ ID NO: 45 - DNA, 1456 bp, Glycine max
  source 1..1456: mol_type = genomic DNA
gaaatcaaacggcttagtctgatcaagcatcccccatttcctcgccaagaacgacaattgtagttgccgtcatgccgtgcacacaaataggaagctacttagcactgatagttataattaattaaatacaaataaaagaaacagacagagagagaagagaagaatcgttggttgccaaggaaagcatctttgagaaacgaacagaatgatgatcgactaaatgggaccttcacttccacttccactcgctgtgttcaaatggctttagcaacaacaacaatcaccaaccatgaacctctgcctcacgctcactctcggatctcagtcgcagatccaccttcagcgttctcatggacccatctacttttcgtccagctgtagtcatcgataatggctccgggtacccttttcatcaatttctatcacccactttctcttttcgctttatgttgtattttttttcttatgtggtgtggacaccatatgtttgttggaatgccccactgatgttagttttataactagaattgtctgtaatgttgattgacccgaattgggtttactctgaatttggaaaatgatgttttcttttttttgcaggtatacgaagatggggtttgctggtaatgttgagccgtgttttattgctccgacagttgttgcagttaatgagtcgtttctgaatcaatcgaggggctcttctaaaggcaattgggtggcccagcacaatgctggaattatggcggatcttgatttcttcattggggatgaagcacttaccaagtctcgatctagtagcagttacaatctcagctacccgattcagcatggccaggttgagaattgggatgccatggagcgcttctggcagcagtgcattttcaattatttgagctgtgatccagaggatcactatttcctcttgaccgagagtccattgactccgcctgagagtcgcgagtatactggggagatcatgtttgagacttttaatgtgcctggactttacattggtgtgaattctgtgcttgctcttgcagctggatacacaacatccaaggttggtaatcgttacacccgaaaaagattgggaattatgttgaatatagaattggaattggatgattaatcttgaatgctttacatatttagtatggcctcagcagcaacaagtttggtagctacctaaacacaaaatgcactggatgtttcatcagcccctgcaatttgacacatttggatgctttcacttgaaaccaaaagtgaaccgtactgtagaatatgaatgaactgttgaggtgctttcacttggatgattaattttttgttttttttaactaaaaataagtaattgcctagttgagctgatcaacatcatgaaagtaacaagaacaaacatatctgtttaacttccaccattgcaaaaggtagttagttattgattctcctgtttaca

SEQ ID NO: 46 - DNA, 4686 bp, Glycine max
  source 1..4686: mol_type = genomic DNA
gagaagaaaacaagagagtctaggagagagagaaggaaggtagttgtttaaagcatgttttggaaccgaacagaatgatgatgatcgagttaatgggacctgcacctttcagttgagatggatgtagcaatcaccaaccatttcaatttgtctatttccttctttcacttgggagcaaagcctctgtcaccatcacttacaccttcttcttccttgttccgcttttcacgaccatgatcctctgcttcacgcttactctcggatctcagtcgcagatccaccttcaacgttcaccaccttttcaatctttctcatggatccctctacttctcgtccagctgtagtcatcgataatggctccgggtaccactttcctccatttctatcacccaattccctttctatgcattatgctattttttttctctgtcaatatgtggacaccatgtgtttgttgaaatgccccaatgcagttttcttagttttaggactagaattgtctgtaatattcattacccgaattcctgaatttggaagtgatgtttttttgcagttatactaagatggggtttgctggtaatgttgagccatgttttaatgttccgacagtggttgcaattaacgagtcctttcttaatcaatcgaggaattcctctaaaggcaattgggttgcccagcacaatgctggcgtaatggcagatcttgatttcttcattggggatgaggccctctccaaatctcgatctagcagcacttataatctcagctacccaattcagcatggccaggttgagaattgggatgccatggagcgcttctggcagcagtgcatattcaactatttgaggtgtgatccagaggatcactattttctcttgacggagagtccattgacttcgccagagagtcgcgagtatactggggaaatcatgtttgagacgtttaacgtacctggactttacattggtgtgaattctgtgcttgctcttgcagctggttacacaacatctaaggttggtaattggtacacagctagaaaaaaaattgggaattatgttgaatatagaattggatttggatgattatcttgaatgctttacatatttaatatgatctcagcagcaacacggttggtagttatctaaacacaaaatgcacattatcagcccctgcaatttgacacatttggatgctttcacttgaaaccaagagtgaaccatactgtagaatatgaactgttgtggttgttttgcattattacatgcgcatatgataatttatcagctcccccgattatgttgaatataaaatgtagaatatgaagttggttatgcataattttacttgaacttgataacagtaccataggagctatcaagatattttgtttcttattatatctattttattttaagaatattttcatttatggctgatctgaaatccttcatagtgcgagatgactggagttgtagtggatgttggagatggggctgctcatgttgtacctgttgcagacggctatgttattggcagtagcatcaaatcgattcccatttctggaaaggatattactctttttgtgcagcagcttatgcgggtaggaaatccttgtggtataaatttaaaagttattgtgctcttcttgttaatgttgaaggatctcacaaactaccatttacatagctagtgaaatcaattgtaataatccatatccaattgccaatctgcatttttccaagccagattcacaacctgttgtgttgacattgcttcatgcaggaaagaggagaaaatgtaccaccagaagactcttttgaagtggcacggaaagtgaaggaaatgtattgctacacctgctctgacattgtgaaggtggtctttagttcaatacttagttctttgacagaatcatttgaggagtttgtggtgtttctctgccaatagttttgttgcctctgccattagtatatcgagtgtcgataaattgtcactactttaatttgcttttcttttttgtgaatcaagggatgtaactaaagttatcttttaaacttgttaattttcctacataaccagactcattttctctcaggaatttaataagcatgacaaagagccagccaagtatatcaagcactggagaggtattaaaccaaagacgggggcaccatattcctgtgatattggctatgaacgatttcttggccctgaggtttgttctatggctgctctttgaattttctctattatggataactgaatctttcttaggggacacctccggattgttctatggctacttgttttatacctatttttagtatgacttttttagtatgatctttctaagatcctgacttcctatcattaatatccagcttaacagaggggggttatacagaaaagtggtaaaaagtaaaagaggccgaagtactagcgtgggaaggggcaagggaggcttaagtacaagcaatgtagactggttggggtttgaatctaggatgaactgatcaagtagtctccatctctcagagtcttgataccgcttatctatgtatagctattagttccacttgatcttgttccctaaactactgaagaattaatgaaaatatagtagtgccttggtctaattgtggagctaatccatgggttcagtttgggtcataatgttaacaggatcagtcatattaacatatctgtatgctttccctatgatttctgcagattttctttaatcctgagatatatggcagtgactttaccacccctttgccagttgtaatagacaagtgcattcagtctgcgccaattgacacaaggagatcattatacaaggtgaagtacctttacttattaacgtgtatataattaagctccaagagtgcttttaaattttagttaaccaatttttattataaaattagtgattttcttaggccaaatgttaagcttggggcattttttgttgttggcctgatggaatacaatagtgtcaaatgttatatatataagtccacaatcccagccatgatatttaatttctgatcatataaatttcaagccctttagtttacatgttcttaatgattgaattcttcacctctttcctattttgtcttttttacttcagaatgtagtgttgtctggaggttcaaccatgttcaaggattttcacaggaggttgcaacgtgatctaaaaaaaatagtggatgctcgtgtccttttatctgaagcgcgcttgaatggggagataaaagtaagagttaataggtacctttagatcatatttgcattgatgattctcttcctctcacacacagacagatactaaattctttataatttatataaaccttgcttgcactagtcgtatggactaaaccaatcaacagccaatacatcattatgttgtattaaataattgcataaatccttgtcatgtaattattttccattgaaattagtgatgtgttggttgttaattgtattttggaaggtctgactgctatatatttattgctttggcctggcatttacttttttatatttggaacctacagtcgcagccagtggaggtaaatgtactcagcaatccaatccagagatatgcagtttggtttggaggatcagtgcttgcgtcaacacctgatttttttacggtatgcatttctgacaatttttttttggggcgagggtgttaagaggttcagtgcttccaatgtggggctcaagttccataccttacaatttaatcttgacatcccaccttgctccacagccctggtcgcccatgcaggctggctgtcagtgtgatgtctgtagttggttgtcaatgcctctttatctggcattaataaccaggatttttgtacgctttgccatatgattaaacgaatttatgattgaatacatggtattgcttgccaagtttagaaatatagaacttgaccagtgcaaaatatgaccgagttttttttttccatccctgtggactgcaatgtgttttcttgtgataatgccattctccttgggagtgtccataatttgttaatgcttcttttaatccttccaataaatctcgatgcaagttttacaatatctggtccattgtgcaggcttgtcatacaaaggcagaatatgaggagtatggagcaagcatttgccggacaaatcctgttttcaagggaatgtattaaatcaacaacaaattagttgattatcgatgcagttatatgataagactgttgaatgaaacagctggttatcgttatcctcaattcacttcctgggctttcttcccacctatattcagggtggcagaagtgagtgtaaaatatgtgtattaagtgaaaatatgcgtttgtttttattccattcctaggtagtcagtttcacagggttaatacagctgtcagcagatccagacgatacttaatggttagatagaatttgatctttgacaaagctggttgagctgaattgcaaattttggggttcagcttagagtttgatgaagttctgcattttttgtcattcattgatgggactgataataccatgaagcacttttctaggtagtaagttaaattcattttgattgaattgtaataagcaccagtgcaggttagatttatgtttacgctaaatcgtgattcatatatttttgcacttttgggtaca

SEQ ID NO: 47 - DNA, 5838 bp, Glycine max
  source 1..5838: mol_type = genomic DNA
ggttttattttgttataatctgagtttggcagctagtttgacatagaaagaagctggatagagggatcttttggggaggagcggtgcaacaacacgactgatttaattggttgagcaagatgtcgacctcgacgaacgtggtagtcctggacaacggcggcgggctgatcaaggcgggcatcggcggcgagcgcgacccctccgccatagtcccgaactgcctctaccgccccccgtcgtcgaagaagtggctccacctccactccggcgacgaggacctcacctccgccgccgtgcgccgccccatggaccgcggctacctcataaaccccgacctccagcgcgaaatctggtcccacctcttctcttccgtcctccacataaacccttcccagtcctcgctcctcctcacggagcctctcttcactcccccctccatccagcgctcggtggacgagctcgtcttcgaggacttcaacttccgggccctgtacgtggcccactccccctccctcgtccacctccacgaggccagccgcaacaacgccaacgggctcctctccaaggcccagtgcagcctcgtcctcgacgccgggttctccttcacccacgcctcccccgtcttccacaacttcgccctcaactacgccgtcaagaggatcgacctcggcggcaaggccctcaccaactacctcaaggagctcgtctccttccgctccgttaatgtcatggaagagaccttcatcatcgacgacgtcaaggagaaactctgctttgtctcactcgacgtcaaccgcgacctcaccatcgccaggttcgtttttgtgtttgagggagcagtttgcaaaattgaatttgtatgaatttcatcttgcaaaattggtcaaatgagtttgaacagccattgcatctttttccggaggtagtgttaaatacttctatgaaattttagtttttaccaagccgagtgacatcgagtgattcaaattgccggcctcacctactggataaggcttttgtttctacattgatgctagttaaaattgattttgaagtgaaatgatttatgtgtgggcattttagggtaaatggttactttcgtcctgagagtgggtgataatttagcccctaaaagaaccaaaaattgaatgtgtaaaaagtgtgacaagtacatccttgacgttcaaggaccaatttgacattactttgcaaagtttaaggactaatttgatattaagttgtatgacatgtaattgttacactttttacatattcggagactaaattaaaaattttgttttttcaagaactaaattgtcatcgttttacactttcatggactaaagtggccatttactgggtgttttattctaaaagcaacttaatagtaaaattcaatatttaatttttttatccaacgtaaaagctatccaaaattacttcaacttaattcatgttggacccaaaatcaattaagcaattgaacatttaagtaaaaacaccttaactagtacttcaattgatttttgacaactcaacataaaacgaaacacatactttaactgatttttggtgactcaacgtattagagtattataaggagctgcaattattcaattgcagactcacctaactactagtaaaagtcagtcagttagttagaagttagttagaagttagttcgatagtaactgttagactctttaacagaactgtctatatatactcctttgtaaacctcaatgacttgggttaattctctctctctattctcttagattaggaattctatgatggtatccagagcttagttgatcatcaatggagacaaactctgtttcttcttcttccgcttcagcttttctgagttcaatttcacagaaacttgatgatttgaatttcttgctatgacggcagcaaattgagcttgtcatcaaatcccacaaacttaaaaggtttgttgcgaatccacaaattctgttacggtttctcactgaagcagattgcgatgcagggattgagaatcctgcatgagacgtgggaacagcaggattaggttcttctcacctggttacagtcgactctgtctacatcgattttatctcgaatcattggttgcgtccattcgaatccacgattattttcacaaacagatacgagccaaagcaagatggcttcaaactgaattgtgtgcgacaatgcttgaagacaagtcgatgtgcgagtttctgcttagaatcaaagccatttccgactcacttgcctctgttggaagtccaatttctcttcaggaacacactgatgctttacttgaaggtcttccacaagattatcattcagtaatctcagttattgaaagtaaattccaacctcttcctattgaagaagttgaagtgctgcttttagctcacaaagcttgattgctgaagtttcgaagacacatctttgatttgccttagataaatcttactcaggtgaaccctaactcttctttgtcgtttggttccgatgcttatgcagcattgaacaaatcttcacaattgtatgattcggagacctttcgcggtagctttggtcattgatggaagttttaacagagacggcggttgtggtggtggtggcggcggttgtggccatggaggaggacgctttgcaaattttcaatgtcaagtgtgttacaaatatggacatacagcatctgtctgtcactatcggttgactagagttatcaactgaatctttcattcacactacatgatccttcaaatcaaggaaatgttcagaccaagtcctttggtcaaaatcagtattttcaaggaaactctaataactctggtcagaataactatggacaaaacaatggtttcagatcatcaaattcatggaatcaaggaactaatcagaatgcgtcaatgctgaacaaccaaagtcaacaacctccaagtgcaatgattgcaaactccaattttcagcttggtcctctacaacctggataccagatttaggtgcctcctttcatgtgacaggagaatcacaagaacattcagcaactcagtccttttgaaggtccagaccaaatctatattggcaatggacatggcttgcctattaattccactggttcttccacttttacctctcctattagtcctaaagtgtctttatccttgaatcagcttctacatgtgcctactataactaaaaatctaatcagtgtcagttaatttgcactagatgatggtgtattttttgaattccatcctaatcattgtcttgtgaaattatagggagtcaatgaggacttacttcaaggctcacttggacctgatgatttatatgtctttccaaatcttcaactccaaggctcaactgctgctagtttagcttcttgttttgtttcaaattctgtaactaatgccagttctgatgtaaataatctcaattctgatgtaaaaactacttttcaagtgcatgtactagcacaagttctcaaactctttggcaccttagattgggtcaccctagttctattgttgagacttgttcttaatcattgtaagataccaatttccaataaaaatgtgtttgagttttgtgcagcttgctgtgttggtaaatctcacagattacctgccactttatcttttttttttttggacagaaacctgccactttatctgaaactgtttataatcaacccttagaattgatatatggtattcgagaaagaaagagagaaaattagagagaaagaaaactgatattattgcaatctgaaaagttagttagagttagttaccttagaggtatatatagacctctgaccctctgaactaacactaacagaaactgatttcctaacactagaggggtgctgttagcaaaagctaacagcccttacaatcatattgcctgctgtctaacactagaggggtgctgttagcaaaagctaacagcccttacaatcattctacaaaactgttttcacagttatacaactgcagactcacctagctactagtaaaagtcagttagttagttagatagtaactgttagactttaacagaactgtctatatatactcctttgtaaacctcaatgacttgggttaatgaataacattttactcctttcatccttttctctctctattctcctagattaggaattctatgacagcataaaaccaaacacatattaactgttaggtatgttcatttttgttatgttactgtttgttgcttcattaggataatattgtggcctgagaaaaacatttcatgtttgtttttataggaagagtgggaaagagaatctgttcaggtgcacctacgtgcttccggatggtgtcacgtacacaaaggggtttgttaagtatccagatcaggcgcagcgatatcttgcattgagggagggtggccttcattcttcatcaccagtgcaagcgcaggaggatgtgaatttcacggaaattgccgagcacccagagaacaggaagagagttgatttgacaaaaaatgtatttgcaagcgtttcttgttgtgtggctttcatttgtgtcagtgattttgatgttatgctttcactttgtgtgatccttaggaatttgacttgacaaatgaacggtttcttgtgccagagatgatcttccgtcctgctgatttgggtctgtcaatacaatgtgattttggttaattctttgcttgatgagtttcttaagtgactgtaaatgaggatcttagtcgatttattttttgctcattatgattagttgggtgttctcttatctgtaaaatgctgagaaaaaggtttgcaggaatgaaccaggctgggctagcagaatgcattgtacgtgctgttaatgcgtgccatccacatctccgccctgttctctatgaaaggtaactagctcagagcattgttgatggccttgtttgtagacatttgcatttgtcttaatttgaaacactcaattttagatgttatgtgtgtgtattttttgacagcatcattttaactggtggaagcaccttatttcctcagtttgccgagagactgtaagttttttgtttggatcactgcactttgtaccaagccatgattgtttttgcacttctgtgatctatcttgccctgtatagcatggtgtaaatgtttaattaattcattctaaatgctgtagagagaaggagcttcggcctctagttcctgatgactatcgtgtgaagataacgactcaagaagagtaaacatcttccctaaatagtttttcttccgagttgatattttgcataaaagaacttatggttcttctacagtcccatactaggtgtttggcgtggaggttcactgttggcatcaagtccggattttgaagctatgtgtgtgaccaagtctgagtatgaggagcttggttctgctagatgtcgcaagagattctttcattaaatgtgcatgctatcaacatatctaccctaatattgtatgtaaccctgatctgtagtatgtagttgatgagattcataaagatgtcacttttttttatctctttcattttccaattcctacatcttcctcgcaagcaaatgccacattggagagaagatcagaagaccatggactgctagtgcaggaagtgtgtaaatggagaatattgattgaacccactgtacgtcattgcactgttcagcgaatgttctgtcctcatctttccaacggattcttacacgggaccaaggtttgaaatgtggatgatcatctctgtaaaaaatttattcaggctacagttttcaggtgaatatgatatgatgcaggcatactggtaatattggatcaaaa

SEQ ID NO: 48 - DNA, 4004 bp, Glycine max
  source 1..4004: mol_type = genomic DNA
tgaagggcccaacagaaatcccaaaacgcggcatcaacgggaaactcgaaacgaaaaagccctttttcaccccttcccaacgcacgtttcgttctcttctctctgctctgctcgttggatttcaaactcacattctctcccctagtcatgtatggcgatggtgagtgttcactgtggcctctcttttctaacaaaattgcaattttattttgttggtaattggcagacaaagcatcagcaatagtgatagacctgggttcgcacacttgcaaaaccggttacactggctaagatgctcccaaggccgtctttcgctctgtaagtgacatacattgttacataaagtggttgtttatagctttgttattattttgcatgtgtttatttatttaggttgttggtgcaattgatcaaatggacattgatggaactgctgatgttgatgagaactcaggagcggacaaaaacaagggaaaatgcaaacttaacgtagggtctcagtcactaggataccgcagagactatatggaggtaacacttcaaaatatctatctatctatctgcttgcttaggcttttaactattctcatttgttttgatgctcatcaggtgctgtcaccattgaagaatggagttgttgttgactggaatattgtagacaacatatgggatcatgctttgaggttggttgtttctgattacttaatctggctataataggatcatcattttattgatatagcatatgcggttgtcaattgctaaggttcctacttcttaggaagctcgtgatggttcttttttatatgcagtggtcccaaaaattagtcaactattgtatagagagtaaaaagagaatactgatgtggttgagctatcctgttgtttatgttaggacatatgtttatgcaaatctcactttatgtttacaaattcgtgttgtatgtatttccattcttgtgtcaaattttgttctcttacaaatttctgctaattaatttatctctgtctatgctttatgctactattcactatcactagttttcagggaatgcctcctagttgatcctaaagagcgtccaatgctacttgccgaaccatgttccaacactcaagaacagagagaattctgtcaacagtaaacccccaactgtccctctcatttaagtttttgggttttaggctttttgctgtatacactattatattatttcatctttgtttagtaataaagtttggttcaaatgcatcagggcagcagaacttatgtatgaaaaatataaagtaccagcgttgtttttggcgaagaatgctgtaagttgtatgatctttactgctctgtccatatcttacttgcaagttgcaacaaaacaaatagtgataaaaatgtattttatattgttggcatgaaaccatgaatttgtgaactagttcatgaaggagtatttcttggcaccaggttctcacatcttttgcatcagggcgtgctacctcattagttattgataggtacgagcctttgaagttgttgacaaacagtttggttctgtgttgatattaatgtgcagtacaaatgccaaattgcctacttatgaatgtggtttggtagatactgcaatacatttgtcttcctttcctttccagcatgcaactaaatgtctgttgtcactttactttttaatatttcatttattgattgtaattgataatgccgcattacaatactacatttctgacgagtagttttgttcattattttaaaactcagtggtggtggatcaactactgatgtaccagtactggatggttatgttcttcaaaaggtattgcttgctgtcctgtcaaaaagaaatcatacattagacaacttggtccattttttaagcatgcttattaaatttagtttgttatcttgagactctaattttagtactttgtatgcactattcttccaaaacatgcttcttcattaaaaattatcactagtgggttatggtttcaagtaagtcaatgatatatttcttaaagatatttaatatgatatgtgataaattatctgatctttctttgcaaaaaatataacatactctaatacagggcccttttcgagtaaggaagaactccatagaaaattgggaagaggaagggaaataggaatctaaactgaattcattcattttctacttttcatagaacaatacaagggatatatagctgcatgatgcaataacagaatcctaacaaactcaattctagaacctacctctcatattatctatatctattattattaaaagacaatgctattaatactctattgggcctaaaataagaattgggtcaaaacatactccctctggtcctattataagacatagtttaaaaggaattgatggtcctttttataatacactttagaattcttatgaagcatttaatcttttttccattagttgcccttattaaatattctatgtatttgtactttttattgatagtggtgtataatactcttggacttttatattttcacatcatccataacaagttaatgattattaataaggacatagttgggacaatgagtaacattttttaaaaactcaataaaatcaactgaattaattactttattggtctacgtgattgatgtctaaagtgccttataataaggactattaaattgtgtaataaagagtaagtagtaactataaaatttgtggaaagtactaatgtaaattggtaactttgacacattggtgtgcaagttccatttagtttcctgggtgactccatatcaatattaatatatctatatatgtctgtggttgatgtcttacattctctttccttgatatataatttagaagtatttgtgttatattgtatttgtagccttgtattttgtcattaaggtttattcaagtttcctgtgtctgcttatgtctttatttatgtctacaataggctgtgataaattcaccaatgatgtttttaccttcctggttacattgaagttcattattatcagattctatacatgacatgatatccattatgattacttttccatggcagagagagcatattctaacattcctatgactccatgcgagcttcctgatggccagtaagtccatcgttacttgtattgaaatactgaggatttgttgaattatttgaatggtcttctaatcttcttccattcttgtctctgttatgttctgtgtatctacaatctttgtttattttacccaatgcattgcaacttaagatgacgcattatgatttttacgtgattttgtttatacatcaaggagatagtgccctcttaatcatggtggtaactctatgcagtgtttggataggggggagtatactggcttctcttggctccttccagtagatgtggttctccaagtccgagtaagtgctaattcattgcaaaaaaactcagttattcaagttcattcaccttaataaattttttaacacaaagctatttcactgtgctatgaataggtatgaagagcaaggtgcttcttatatccaaagaaagtgcccttgagttttctaacggatgtgaatacgtgtttattttcttaccattattgggagcccggcagtttcaggaagtccaatgttgagcactaaattagtgcccttgtcatcaatgacctgtttcgaattcatgctattctcttcagtgttttactaggcggttataactattgtctagattgatattgacagcttatttatctgctgtcgaggttgatgtaacattataactattctgtaactggcacaagctcattttctttttctgcatcacactgcatgactgcatccccctcccatatagtgtaatgacgtctaagttaaattcctgttgaagtctggatagtggatagctagctattaccgttgctgcaccccattgtgcttattgatgccaatacagttaatgctcgaggcattagtgacactttaactaagctaaa

SEQ ID NO: 49 - DNA, 13434 bp, Glycine max
  source 1..13434: mol_type = genomic DNA
ggtgcacctaacaacacccttttcatttgtctagacaacaatctcttacgtggcacaaaactgatcgctctctaatgacattgatttgctcttacactacagtttcctcaacaacaaacatcgaccaaggatacttgtcgtcgtttctcaaatccaaaacctcgcttcactcgattgggcgtgtgccttgtcgtcgtcgtcgtcatggcgacgctgctaagaaaactgtgcgaatcggcgacgatgaagcgatccggctctcactctcaccctcaccctctcccgtcctcggaacaagcacgcccatcctcccctcttggcgccttcgaccctctccctgccgacatcctcatgcaaatcgtccgcctcttaggccccaaacacgctgccagactctgcctcgtttccaagtcttggcggtcactcgtctccgacaacgccctctgggcccacttcctccaaacccaccacccccactccccgctcttcgccgaaaccgccctcagctccggctaccctctcccgtaagttgctttactctctttttttgttcttaccaacgagcgcatgaatcaacttgtacggaattgtttcagtcgtgtctcgagttcgagtctttttagtgtgttagtttttgctagcaggaggaatagaacctgcgactttttcccccttcccttatttcttaaccatccaaccaaccttgtatctccttcgagtgagttgatatgcaactgcgataagtaactgactcgaatagaattgcctttagcagtgtattaaaaaaataaacatttattcttcccactaattgctttgattcaactctaattattaaaattgcaggaccttgcctgctcagaattcaccacgtgtctcgttccagcatgcttacgcgctgcgtgaacgagtccctccttctgttgtcatcgacggttagttttactttacctttaactttgtttcgttctctctctggaaatggtactttttgttattttaattctctttttgttcttctttattagggggttctggctattgcaaattcggttggagcaaaggggcctctccttcggggagatttgctacttttttggtgaggctctctgcttcgggtgaaggtttttggagttgacgtgtttagtgcttgattggggatttgatttgcaggaatttggtaacgttgagacgcctatgtatactagactgcgacattttttctccactatctataacaggtgtgcaagtcatgtgtgttttcttcttgttggtgaaacagttcactactgttgataatcatttaagcaaagtgtgttagttgattggcataaaacacgagcagtcatgttgtggaagatgaagttgtttttgttgattgcttagttatgagcttaatgatgataatgtgttggttgctttctctgtaggatgcaggtgaaaccaagttctcaacctgttgttgtttctataccaatatgccactatgacggtcagttaaattttatggttttactgcagttgttaaaatgtagggaaagaaaaagtgtacagagaatttcagtgtaatatattgttgtatttgatacttatgtatggatcaatattgagaaaagccttaaattgggcttctaaagatcagtgtgtcatgatgttttagtcatttgaagatttttgtcaccgtattagtctttcaaagatacaaactagctatcaaatttgcccttatgtttcaccactgcagtcttctacaaggatgaatgcggtgataatactctaatttttatttacaaatgtggctagattaaaagtttggttgctttgttccctacataaaagaacaaattttagtcatttgaagatttttgtcaccaaattagtcttttaaagatacaaactagtcatcaaatttgcccttttgtatcaccactgcagtcttccacaaggatgaatgtggtcataatactctaatttttatttacaaatgtagttaaattaaaagtttggttcctttgttccctacataaaagaacatttacaaatagttccatgttttctctaaatctaacaccatcataattatggcaagtggtgcagactgatttgtaaacttttcatgtggggaccaaaatgtaaagtttttctaagtagggaccaaaattaaaaaattgtcaaatatagggatcaaatttttaatttgatctacactatcttgtgagagacaagaggagttaaccttggctatataaccatgcatggatgctaaaaattggcttgcttaaattttatctttctttaaccatccattttggttatgtagtcaagattgcattttcttattctaacacttgatactagtatgattttctagccgtgtaatgttctgttttgtacttgcagataccgaatcagccaaagcatcaagacaacaacttaaagaagcaatctatgttgtcttgtttgacatgaatgttcctgctgtatgtgctctcaatcaggtaaattttaatgggaacgaaaaataataatttctgttaccattttaccttttctgaatagaatttattggctctaagcattgggcttggagaatccattttgttcctcttttaacttagttattgcaagagatacatggattttggtacttgcacctttctgacaaatataagtgtgttacccacatcctcttgtttttaatatttataacctctttcaagtgcttatatgcaagttatactatcttatattttcatccctttcaatagagagaatacatgtgcccttcctcttcgtctcttgtagaaaaaaatatgtagtttagccttgttttccgcattgttaattgaatttatgatggtcaaccagactatttatccccccatgctcatgaaggtaacatttggcatacaaaataaacaaaatagatcattatattctatttccatgctttacatcaatcttaattggaaccaaaatgaatcagtattctcctcatgtcctgttctgctctgttttttagatgctcaccaaacatagcatataactcatgtattattccattctgctacatctgccaaatggtactataaattctagatcttttccttttcatagtgttgatggtatctttgtagttatgtgacctgggatgccctttcctattccaacttggtgtgatgcatgcttatcaatccttggtagcgccgcatagcggctgacccccaaaacactatagcagtatagtgcatgctgaatggtaacaggatatcatgtttgtaattaataataaaaagttgtatatcttagctcttaagcaagtgtacaactataccagtaaatagtattacagtaacaaaggatgccatgactaacctaagagatagagaaaaaaggagggaatgagtttgggtcttagggagatagatgaccaaataaaaaaaagatccaagactcagactagacagacaataaacaaagaacatgaactgatggaacaaagagaataaaaagaaaaaaaaactactcagtagagagactaaaacacagaaaacatagatcgatgagaataagagtacaatgagaacaagattacaagaaaagctgctagatgggttgttggagacatactggagggccacacgccagagggttgcatgagagttctccagtagttaccaggtatgagaggagaaaagtgaggcatgatagttatgaactttgaaagggttttctacaagcttaagcccttttaaacccaaaatacctccataaaattcccctttaacattaatatttgaccgcattctcaggatttttgacaccataagcatagcagtgctatgtctccatgaaatgcccccattgcagccactactgtgaagtgtgatgctatggtgatgcatatagcagttaggggctgctattcactgctacgatactatagtgcactattgacaactatggtgtgatgcactgtagtgcactattgacaactatggtggaccagctagaccacttgtctccaaaatggcattatttttcagtgaaggttgggtcttcccctgctctcagtatcaattttatctccctacccaaccaaactaattcattcttactagaaactcatgagctgtgagctgtgagcagtgtctttggtggcacatgatgttggcaatgggggcgatgacatgcattattgatagtgggttgggatattgatctgactagtgacatagggcacaagttaaagtgtttcagtatggtgatcagaaggaaaggaagttgtgtggtgtgatggtgtcaaatgacagcagtgacaagcaataatgtgccagtcctctgttgagcagcaactcttttgctctgggatgtgcatgcaattcctctgttcctctgagcatgcatcacatccatccattttagggtccttaaggatcaagcatatttctgattggtttgtgttaggaaccaagaattgaaatgagaaagaaaagaaaggattttattgactagtaagaaaagaacagaaaataagagagaaaactctccttcagaggtttccccttcacaaaggatttctcctttcacaaagagctaatgtgtctacaaatgataagatctccctctctcctatcatttttcccctatttatatctaataaactcctctatctaactaactaaccccttaaccaactaatcaatatcctaactgtggtagctaacttattaatagtctaactatgttaactaactttcccttctccttatatcctaacaatacacccctcctaaaaatcaaccttgtcctcaaggctggaatttgaaaactgaaatgacacacttcctcgagttttctcctttccatctgaaatttcctttgctcttcagcctttcgtcgggcttcctcagtcaatgcaacctgacgagcaagtttttgtctctgtagtacttgctgctcttcacgctcaactgcttcaagatgaactttagcagccgaaagtaagtggttgcagtatccaacatgagtgtcaattttcttctcatcaaacccatgaatatgtaggttggaagcagcagacaactgactaaatacacagacaacattttgcagctcagcaacagttgctctcacctcgtctacagtcctctttgtcttttgtagtgttgatgctgaaaacttttgcattgcaacccctgcatcaaaccttaaagtatagtttgagggtgccaaatgaatggctctcagtagagtttttgtacagtcttgccactgttcagcctcataatgtgtacgagctaaatatagaagtatttgagagtctgtgttataataaaaattccgcaagctatattttcacagccaaagtaaattagtaaaattcccctgagcaaaataaacatgcgatagattctttggcctcttctcattgcgaactgctgcgaagtagttccactttcccgtagtgactctattgcccttagcatcttagacgatgatttactagttgcaagtggtttggtgtctagtagtttggcttacatgccaaaattccttgctttgtcaacaaagaagacccatctttctccttgagaagttgtagttctgctgatgataacccattaagggttgaatgtgagcttgcatccggcgggtctggtggtggtgtaggcgcaatcaatctccatataatcccaaattcatggttgtgggtttcataaagaaaccattatcaccctcaacatctatgacatttactacccaagaatgagattctttgatgataattgagaaatccccttctttttcctgcattttctgctgcaaattctcagtctcttccaccttgatctcctctaccacctcggcatcaatggttttcgagtctttgtcttcgacaacaaactcctccccacggtgggcgccaattttcattagcaggaccctcaagggcttttattgaatcactgtcttgctgtgactttgttacccacacacccaactgcaaagtcgatattgtctgcatgggttgtttgtccctttttcaaactcaagaatgatgcccttttcccatcacaattggtttgcatcaagggtcaacccttagcccctacctttttaccttaattctggatgtcctcacggaacaaatccaagagatagtgccgagatgcatgctttttgcagatgacatagtcctccttggagagtcgagggaggagttgaatgagaggttggaaacttggagacgagctctagaaacacatggctttcgcctaagcagaagcaaatcggagtatatggaatgtaagttcaacaaaagaaggagggtttctaactcagaggtgaaaataggagaccatattatccctcaagtcacacggtttaaatatcttgggtctgtaatacaggatgatggagaaattgaaggggatgtgaatcatcgcattcaagcaggatggatgaaatggagaaaagcatcgggggtgttatgtgatgcaaaggtaccgatcaagctaaagggaaagttttatcggactgcggtaagaccggcgattttgtacggaacagaatgttgggcggtcaagagccaacatgagaataaagtaggtgtagcggagatgaggatgttgcggtggatgtgtggtaagactcaaacaacaacaacaacaacaacaacgccttatcccactaggtggggtcggctacatggatcaatttccgccataatgttctatcaagtacatgtgtggtaagactcgacaggataaaattagaaacgaagctattagagagaggggttggagtagcgcctattatagagaagatggtggaaaatagacttaggtggtttgggcatgtagagagaagaccggtagactctgtagtgaggagagtagaccagatggagagaagacaaacaattcgaggcagaggaagacccaaaaagactataagagaggttatcaaaaaggatctcgaacttaatgatttggatagaagtatggtacttgatagaacattatgacggaagttgatccatgtagccgaccccacctagtgggataaggcgttgttgttgttgttgtttagtctctttaatttcctcaattgttttcttgatcttgatttcagagggctcctcctccatgctttcctcccttttaacctcaagaatgttttctaaactttttagttgtccatgcttcaactctgaaatgctgattttgcaagaatgatggtgcaaccctcaagaattgggttcctcttcctaattgtcctcgctagacctgttattgtcattgttctcctcttccagcttcttgtctctgttgaccaagttttccccactatctgaaggtgtctttcccttcttgaattcaagaagtagttccttgatttgcctcatctccaacaatctttcatttatgagatccatgtctgtttttagatctgtaatcacctttccatgcttgctggccaatttgtccaaagcgctcactctgctctccatcgtgcaactcagatacagcaggttggactagtaagaaaaaaacaaaaaacaggagagaaaactctcctccaagggtttccccttcataaaagatttctcctttcaccaagagctaatgctcaatctacaaatgataagatctccctctctcttatccttcttcccctatttatatctaataaaccccttaactaactaatcaatatcctaaccatggtaactaacttattaatagtctaactatgctaactaactttcccttctccttatatcctaacagtttgttagttatttcttggcattgctgctattccactatcattggtaattcggtattgcttggtctattggttgacaatgtgtttagttttttttattcatttaatattgagtttcactgatttatatgttttttaaaattattttctccagatatttttacaaaatatactacaatttggttccttgttgttttatgctatgttctaatttttatgaatttctatcttttgtgcaattttattatatgaaattctatctcacattcactcacttaatttttaaatttatattgatgtaccatatctgtgttttagaaattcatatccatatctggcactgggtaccgatattgtacccatatgtttgcaacgtaattgttaggttgaacttgaaggtgaaaatgcaaaaacactgatggattgagtggagtagaatcatagttctatgtaaacttaagagcctagaactaggtgcaaaggaacttcttttcaattaacgtaacagtttcaaatgaactacaattaatcaagggtagattgtttgtttttccatgaatataattgtctatcccttttgttcgatcacgtatgggtgttcctgttctttcaattacattttattttgtctttaccatatttacttgtttcttttctattatgtaaatccagggtactttagctctgtatgctgcaaatcaaacatctgggatagctgttaatataggctttcaagtcacatctatagttccaagtatgctctacaattttattctcttttaaggttttttaatttatggataacaatagattccttgcatgaaatgccttaatctactgtctttgttgggttcagagttggtcaatacttgaacagtacctcttctgttataatccatacattgttcctttatctaatgaaaatgagttgatggccaatattttctctgttccccttgttgtgagtgtatctgcattgttgttttacagttttaaatggtaaagtgatgcgaaaggtgggtgtggaggttgtggggctgggagcactaaaacttactggatttcttagagaacaaatgcaacaaaacaacataagttttgaatctttgtacactgttcgcacactgaaagaggtattgttattgtcctttctgttctgaaatagttattttgattgatgggattttacttatatttgatgctgcagtgctcttgagaagatagaagtggacccctaagattgcatattaaatttagtctactttaacatctttaatctagtcagaatatttgttttcttctaagcactcctaagttgaatttgattttaaattttcacttctttggcaccttttgaatccttattcatttgtaaataggtaaatcaaattctctctcttttcctctcttacgctgtctccgttcaaagaaaaagaagctttaggttccctgattcctggtgtacaatattttctaaagatacaaaaaccaagcacccaccttataatacaggatttgtaaactaactgctaatatatactgtagggatgtgatttgtgtaagctgtcaacactcaacagctatgacactgatgttggtcattctgaacttgtgtacatgtgattcaaaacttggtctaggcagcctttttgttaggatatctactacctattttgtggaaggagagtagattaggaacctttttttagacgcaaagatgagaatgtcagaatgggctgatcttgatggagctgcccatataaccaaaaccaataaataggttggaccaacaaatttgatgcctgaatatagttttgcttggcctgaagtgacaggctcataaaatgtcaaaattagtaatgaattttttcttaagtttacttggatgttagtttaaaacatgaaaaagacaatgggactaaccaaaccaagagggaggagggatgaattggtttagaatcaaattgtcaaaaacagagttttaaaactttcgttgtccaaagaatcgtatcacaactttcagttaaaacaatattaaatcaatcacccaaacattgtaccctttttttaaagtgcatcaatttaaaatatctttgaaacttagcaaattgataaagaatgcaatagtgagagatgagggttaaagagaagatagaaaacaagatttatactggttcactctctatttctagagaaactaatctagttatctaattcaactcaaattaaattttcactatgcaatgtcagtttttacaagtaatcacaagcaatttcaaattctacctagaaaatgaaacttaggcacccaaccctagggtccttagtgaatctaagcctaagacaaacctattcttagcttcaaattataaacacctattctaacatgcagtaaaactcttacacatgcagtaataatgtgtaaaaatcatatgaaacaaagttaaggagagatacaacctttacattgaaatgcaagaacaaaagacttgattgaatggaactctcttgatatcaaatgtgtttacaactcactaatcacataacctttagagaaacttttctttagaaatctacaagaaacaaaaactaaagtttgtgagttgaaaaagttcgttaaaaaattgtttttaaagtgagaacacaaggtgggtatatatagagaaaatagttataaccgtctgtaattgattaaattggcaaagtaatcgattacctttcccagtcaatcgattaaagtgttatcccagtgtaatcgattacaatcttgatttaattgattaaagtgttcttgatcactttttggaacactttaaagaatgatgtaatcgattattatatcttcgcaatcgattaaactaagatcctagacatcagacatggtctcaaattgaattgtgtaatcaattacgaatatatggtactcgattaaaccagagctaagatctctttgcaaacttctcaaagacttatgtaatcgattacagacagcggtaattgattaaaccagtgagttatatagcacaaaagatctaccttatatagggaactaccttcctacttctatgtgatgatgcatgatgtactcatagatagattaagtattataagcaacaagcaatacaaatgctactcaataagaagttgggcatgtaaaagtcaaaacacttcttagtcttgatcttcatgttgctccccctatctctaacaaaacaggcattatttgaagtcacaattgatttgaaatctttaaatgcaagttaatctaagtattttaatacaatttagtcaaataaattatttacaaaattgacgttttcgcacttcaataatataaataaataaaatgtgggccagtgaatatgcccaagtagtccatagcttccaaagtagcctaggtcaacaatttatcagcctgtatcaaaatttggtctaacccatttgtgttggtgtgattcaaatgacttcattccatgacaaggattcaacaaagggagctcccaagtcccaagagatatattcttcggacacttcaaaaattgatgatgaaatttgctcaaatccttcgtgctctcttttatatttttattttcatgtgtttgtctcttttcctttttctgtttctccattaaagtttggtgagagtgattggtaccgtacttgcatttttcttttccttcaaaatcatctgaattaaattgtctgatatttcattagtcacatggcaacagaagctatgttatgttgctgttgactatgaagctgagcttttgaaagatactcaagcatcatttgaagctgtagaagggttgtttacactctcaaaagagcggtttcaaacaggagagatcttattccagccacgtcttgctggggtgtaagtttttgactttttgcaatatggtcagatttagtatacaactatacatatttacttcagagattatgtttatatctacgatgatctggtgtgttcgtaaatgagcatgtcattatcataataattgaatggactgattaaaaaaacatagcaatcttttgaaaataacattaaaattgcaattttctcttgatttcgttctaataaactttgtcatttttattttgcatttgtttgagctgtaattttgttaatcataataagaaaccaattaattttcattagttttttgtttttttgggaaaaaagtaacagataaaaaagtcactaatttgatatttcatcttgctctcagaaaagagtgaggatattttgttggatagactcgtattatctaaaaatggtagtgttctcagaaaagagtgagctcttcttgataattgactagacccattttcacttcagttttgttttttcccaatttctaacctttttcaataatttacgacatgttagatattttaaggttagatggaagtttgatggagtattgtattggaagatctatatcttctaattctaattgtacttctcttatttaagtcttgtacgtaaacaaaaaaaaaacttgtgtatttgacaaaaggaaaaatgaacgagttcactccacctacaaaattgaaggtaacatatgagattaaaaaggaatgggagtaaagctatacacgtgttaggggtttgtaaatgagtaactcttatgagccgcccacatacctaggttatttgcttatattttcccagaactgaagcttaggtatattttgcacttattggtataggcgagcaatgggtttgcatcaggccatcgctctttgtgtggatcattgctattctgcagaattggcaggcaacaacgattggtataagactgttgtcttatcagggggaactgcgtgtttacctggtttagcaggtctctctctctctctctaggcactttacatctttgcaacagagcagaaagatgaaatgtaactacttgagatttctaattttactgttgggattgctctgtttcagaaaggttagaaaaggaactccattcattacttcctccttatatgtccaatggaattagagtcatacctcctccatttggtgtggatactgcatggtttggtggaaagattattagcagtgtgagttatctacatagtctgataaatattcaaattttgtttgctgcagaggatgtcacttttatgtcaattaaagtcttgaacattccaattaaactgattgattttcttagatgtatcgatttttttttttttaataatcttgtctcaacttgattgtctgttacaagatagtttgtgccactcaagactgattgttctcttatgtacagttgagcacctttcctggcccgtggtgtacaacgaaaaagcaattccgtcagaagtctaaacttaaccgcatttggtgattactctgatatggattttcttttctgtgttgtaaattatataacagcaacaactgtttcataatttccactgctgggcagcaacactaaagaatcaaatttagttatacttgtgttttagtaacaatacttggatacataacctgttgtgataaaaaaaaagcctttttaagtatcaagtttgtttagaataaaagggtacacagctttcaaaatgtattgtactgtacctgtgaagaaattgttaatacagtttaagattcaatcccaa

SEQ ID NO: 50 - DNA, 8135 bp, Glycine max
  source 1..8135: mol_type = genomic DNA
atgtatggcggtggtgaatgttctgcttattatgtctatgtatgccctcttatttctgattattttcctttccgttgtaattttatttaatttgggagatgaagtatcaataatagtgataaacctgggttcccacacttgcaaagtcggttatgctggcaaagatgctcccaaggttgtccttccctttgtaactttctctcattcaccttttttcatttgcattttattctttgtattgtaagagatatctggaacatacattgtcacatacttatgttgttggtgctattgatcacatggacattgatggaattgctggtattaatgatgagaactctgacaaaaccaagggaaaatgtaaactttatgtaggatctcaatcattaggataccgcagagaccatatggaggtaacacttccaaatatctatctgttgggttaggctttaaattttaatctcatttcagttattttaaaatttttttgttttgatgttgatcaggtgatgtcacccttgaagaatggagttgttgttgactataatgttgtatacaacatatgggatcatgctttgaggttggttctcattattgattctggctataataggatcatcattttgagtattttcttcttctttttggtcataaacatgatcaccattttcttgatataacatgtgtggttgtcaattgttaaggttcctacctcttaggaagctcatgacggttcttttaatatgcagcactcccaaaaattagtcaactattgtatagagtaaaaagagaatactcatgtggttgagatatgatgttgtttatgcaaacctctctttatgtttactaatttgtgttgtatgtataatactgttttccattcttgtgtcaaatatcgttctcttagtaatttctactaatttatttatttgtgtatgctttatgctactattcactatcattggttttcagggaatgcctcctagtcaatcctaaagagcgcccaatgctactattgattataatttaaactattgtatgtactatacaatagctaattaattgtacaattgtaattcttttattttaatttaagggttaacttaatggattttgtcagtcttgcaagtgttggataatgacaacaatatgtattaagctatcccttgcttgccatttagcacatatatttactcttatctccttggttactcttgtgtatcttctggtagtgttggtttgatgtacaatatttaactgttgacagttggttttgaatgtaagtggcatgttttcttcccccaccttttcaatttgaagcaatctttggatatgaatatgttgagtccaattgtgaatgttactggacatgcactaaacaaggattctagcacttttgattctaatataatcattaaggatgaagaaaaagaactccatggaacctttaaatgctttggaagcttaaaacttattttggagcttcatgaaatgagatcagataatcctgaaaagattgaggtagagaaagctttgttgtatgttttcaatttaaatgcacttattttctattcctgcatgtcttaatgtactatataacctgtcattttctttagaaaattaccaaacatatacctattttgtcttctatgccactttctcccactgcaattttttaatctatttctctattcatgtcttactaaatcaatcatcatatttatcaatttattttttttctctcaattttcacttactaaatcaagtgcaattacacattttctgctgaattttgaaggggagatttaggctattctttgtggctttgctgttagcagggactcccctgactctaaagtttcagcaaagatagtagcaacacttgcacctcttcaattgtatatagaaaatatcatataggctattctacaaggcttctccaaagagatataaaggtacctacctataaaatataaatacatgttcattttcttgtccaaaatgaactataataactagtattttaatcacaccaaatgcatgggataaatacttttcctgacttttttttatttttttgtgtaaaatatgttatcttcagtttgctagctgttttgtaaaatatgtcatcttcattaacttaatatcctcaatttttttttaaaaaaaaaagttgtaagacgagttttgggaaaactcatcttagaatcctcaattttttctaatttaaaacaaaatattctaagaagattcttccaaaaatcatcttagaaaatctattttctaacatctaccttagaaattatatctttataagacagtttaaatatcattgtgaaaagtccaaaaatcatcttaagataatttgacattttacgacaatgatttcaatgacggttgaaatctatcacaaaaaatttcttagaatcgtcgtataaagtacttttttttaatagtggttataaattttttgcaaaattataaaatttaataatatcttttttaagtatatctaatgtttacattaattataattattttgaatatattcaaagataatagtatattttaaaagtataactaatatttacttttaaaaaagaaagattgattacaataaaatcttggtacatatcttttacaaaatatctattattataattataaatttataattaatattaatgtaattattttttaaacgtatattaataacctttcggaagaaggggagcttaagcccatggttgtaccctgtaagtccctcactgtgtatcattgaaatctgaattgttagtaaacataggtaaaaaaatgtttcttttggtttcagatgtaagcttaaatataagaaaattttaattaattttttttatttaatattattctttatttaattaaggttttaattttaatgatttttttatttttaataccaaattctaataaagagtaagttgattttttaatgaattaaatactattttagtccatgaatttgggggttgggggaccttttatggtccttgaaatttttaaaaaaattaatccctaaatttttgacaaattattctttttagttcatgacataataaattatcactttatgaccgtttatatccgtcacaaaatgatttttagttttttgccgtaagaattttcattttaaaattaccacaaagttttaaaaattgactcaaagtactaaaaaatcatacatcaagatttatagctagtactccattttcattaaagaattttgtgaagaaaattagaaaaataaaaacatgatcacatatataattaaacaattctaatcatagcgtcctaagagtattagttaaaaaatatatttccttattatttttaaatataattttttatgatttttaatatattttttaatttcttaatcagtatctttaacacactaatcaatagatagagattagatttaggaaaagaagttaatctgtcagaacgtgataaatcaaggtttaaattgtggttataaggtatccacatttaatgtgcaattgtgtttgaaattgaattgcctccaaatgaaaatcatttacaagtctctaataatagtatgagacaatactaccatatacaatttcatagggatgaaaatcgatatatatttacggcattagacaattagtatacttcaccaaccaaggtcaagagtgatgtaccaatcattaccccaaatgagctctttaaggttgatggttttgtcttttctttcccaacaatatttggaatgatggctgctccatttaaggcttttctagaagatctagggaaagcaggacatcttgcaggcaagtctgctggatggaatcttcatcaccaccacttcccgagttggtagaaaagagatagagtaagatcctctgtctgtatttgtagtctttggaccaatttttaaaatgaatgaaaagaggtttaaatatctttttgatttctcaaatttggaccaaatttaattttttttatcttccatattaaaaagtgattgttcagtctatgtaatttggaaataatccatttttggtgttaagactattttgttgtgaacattttagggtaagtttgaagaagctttttcaaaaacacttttgaagaagaaaaaatgaaattagtttttccataagttcaatttaggttatgcataagttaatttatagaaaagttgatttttaactcatgcataactaattttaacttatagaaaaaattattttattttttcttattttattctcctataagaaattctgaaaaaatttacctaaacagacccttcctcttgcactctcgttgaactacaaaaaaatgactgtttccaaattagaaggactcaaataatcaaatttaatttaggggaccaaaaccaaactttgtccaaatttaaaggataaaaaaagatatttaagccaaaaaaatatttgtttttttatctgcagccagaaaatatattaattgtgttatctatgacagacttactgagatcagcaatcaggttggtcatggagtgatatatgttccattcaagaagatcaaggtgaaagtacatatggtgcaataacttattctggaaggggggcggatatgttagagttgagggatgcattcctccatgggatttattttgccgaaatcacaaagaggctcatggtatctcctgcataatgttggagatagtgctattgaaaattgctacttgtgttttttagtcctaaatgtgttgagttctgctttggtttttgcatgctaatgattgtttcttttcaaaaagagaaaaatgtttggtactaagatttgtttttctgatacatggtggagcattggttattggtatttgttattttgtatttccctttcacgaatattgaagccaataaacaagcactagcacatcttgagcaagaaagaagttgctagcccatcactccagccatttactaagcaacaatggagaatcaatcaacagtatgtaatcaacactgtgagctacacttcattatttgatcccaaaataatggaatgctgagttttttatttttatttttcctatcatgatcatgtaaccaaacaaattgatcaatacgtgatgatgttgcaaagactttctcagcacagtagtgggaaaaaaaaaccaagtttttaatgaaaggggatgtatgttgtaatttttgtgttaatgctaataagccaataagctagcaatccttaaattttccagtgttaaaggtattttcacatgttttgactctttatattgactataagattaattttcggtcgagacttagttatatttaaaattatttatttttttctaagaatgtattctattaggatcaaaatcaagtttttttccataaactcaagtgttgttaattaatatataccattaaatttttaaggacaaatttaattatttatcgtattttttattacacctaaaaattgatgttagtacctaacacaattaataatatttgtaatattatttaaataaattttgagttgtataaaataaatgataaatatttgtgatttgataaaagtccagtggtgttgttgtgatttcctctaaatattagtattatgaaagttaataacttacgcgccaatttgtgattcacagtaatataaaaagccttctatgctgtagtacatagactttacatttactcttacattttaaaaataataatattcaggagtgtaaataattaaaatttatctaaacaaaagaatttcaatataattaaaaaaaaactaacaattatttgaagaaaaaaagaaagaaatctaaacataaaagaaattttgaaaaataattgctaatttgaagtttttgaaaatataaaaataagcggcaataacgaatcatgtaattgcctttcgagagaaaaaatccaatcatgtaataatcatgagtcagttgaataatatatatagggtcgagggttcgcattcccgctatttcacaattttcaagttaaactgtttgttttagttagctagatagaaagagaaagtaaagataagtagagagatcttcaagtatcgatcatcatcaatggctgtcaaagtttgttgtgtatatgtttttcaacccttcttttcactaatcattcatttcattcttttttgtggtgttcggtttaaagaacaatttaagaatttgatgcttgagatatatgatttttttaatttttttcatgcaaatagacttaaacattaacaaagttactaaagactaaaacgctgacttcaataatctttttatgttccttttcttgataagcatttcgatcctctttaatttccctcatgttagctcagcaagtttttacgagattaatttacaagatgaaaatttatgattactttgacagtttctaggcaatggatagaaatatagaaaaactggcaaaggaagtggaaaaaaggcgctaactctaaagaaggtgttgaggccaaactatggcaggcatgtgtttaggtttcgtaattaattattgctttgccgttcttctaatccaattcattcattccccatcttttcatagcataaaatggaactatttaagcattgtatatcgatttaaatagaatgagtttagtctgttatgtagtataatattcagtttctgttattatcttttctatataaactcttatatctttctcttagaataataacaacaacaagagtatcatttctcagcactactagaaaaatggctttttaagacacgcgatttacgacggttatttgaggaaccgctttagaaagtggtgcggtggcatttttgtaattattgtgtaacaaatttcattttacgacgcactttctaaggcggttattgaaaaccgccttagaatgttatgttttataaaatttaagccggtttttagaaaaaaaccgtcgtagttgtaaaaacaaataagggaaattgctcctagacctcacgggtgtgcacgtttctgctagctttcgagattgcgctgctttgaaccctagacctttgtgcttgctccttcgttttctgctttgaatcctagacctttgtgtttgaaccctattgattttcgctttctgcttgcatgaaccctactgattttcggtttctgcttgctccttcttccattgaagctccttcacctgttcttccattgaagcttctaccccttcttccattgaagctccttcagctcttcgacttcatcgctccaacttctccgctcgaagcttcgtgaagacagagattggttagtcagttactaactttgttaggttaagcttattttaaccttgttttaggttaattggttcgtgtactgttgaagaaaggtcacgggttccatgtaatttcttttaatggtgttgtaatggtgttgtaaagatagttttttggctgaaatttagtttgctttcatctgaaagctgaaaaatagggtaattcggaaaggacataagaagtgttataaattattgtttaacaatcaagagagattgaagatactgtaatcctatttggagttgggaattttatgcttttgtgggatttaagaactctgttttgtactctttggtttaaaaaaaaaaaaagagttaaataaccccaaattcatgcttaattgcccctagttttgtttggataatgttggagcttgaattggagtttacttttacaccaaaatagcttttaggacaaaagttctgtagtgtgaaaatttggaggggttaatcaggttttgatgttttcttattccttcctgtgaatattcctctaggaatgaatgactctagatagtattcttctgtatctatcatgctaacttgacttatttttctttcttcctaacatgaacctttgtttgcatttgcttgtaggcttgaggtctttgaccgcgagaagtttaacaattgggtggagaagggtgtaactccagccattgaacccagtttaaagctctatgaagatgttttgaatctgggattcaaggttattctactgacaggacggagtgaaaggcgcaggagtgtcactgttgataatttgatcaatgctgggtttaaggaatgggaccagctcatactaaggtaa

SEQ ID NO: 51 - DNA, 4658 bp, Glycine max
  source 1..4658: mol_type = genomic DNA
acggaagaaaactgttgaaccgtttcaaggaaaacagtaaaaacactgctagtgttagttaaactactcatgctcttcctcgtcgccgataaacttctccgtcgacccaaccaaaccggttcggcgctcttcatctccgcgagccactttcgttcacgagtcctccagaagaaccgaaattcagttcaagaaaccactgcgccgtgaccaccatgcctttcatttccaaaattcagcgtcaatctgatttcaacctcttcgattccaacactcctctcgtgatagacaatggcgcctcgtattttcgcatagggtattccgctattctactctcgccaacactaattttcactgtttctttctttctttctttctttctgaatcggttttattcagttcatgttcgttttttgttttggtgaattattatcaggtgggcgggagagtctgaacctcgtgttgtttttcgccacattgtgcaaaggccgtgccataaagaaaccggtactgctttctcacttttttgagctttgcaagattttggttttaggtttttgtcaattattatgcataattgactgaatcttgatgcttgtctgttaagtaaagatagtatttaatattagatcttgtcatagattgcccgggttaatgagtgcttctaaattctaattacttgaaagtgtaataaagtttttattgaaaaaagaaaaaacatttataccgtacttttatataataaatagatgatttctttcttaataaaaaaacttactagtattttctactactaaatgcgttgacacgtgtcatttcagcttaaataaaaatcttaagttctggatatataactgcattaaattataagagaaagagttttgtcacctgtaatggtattacttgcctcaagtataattgcttcccatggagcatacacgtgattttataaaataaaaaataaataaaaatcactaataacatcttaaaatcagctttaaaaggactgttatgacattttcctaactaaattttgttttaaatataatgaatattttatattcatacttttgatttcttagggcattggctaatatttaactttaatatttattttgtaaaatcttgttgcttttttgtgcgtttgcattgtttgttgtgtatactctttcatttggtaaaaaaactaggtcctctatgtgtttgttgtttctggtttaatagctgtattatttagacactggtcctttttgtcccgacattggtcctttttgcttgcctacaactgtgtggcatactgaaatatttgttcttttacgttgtacaacacaggggaaactgtcactattgtgggtgaccatgatccggcatttctgaaatactttgactgcactcactcagggccacactctgcatttgatagcaatgttgtgtaccagtttgaaacaatgcaatatgtaaatttccccgtcgcaagtttaacttgtatgcttcattattttagaagaacttgtggagaatagcattactaacattttctttgtcacacatagattctagattttggatttgatcggatgggtgcaaatggaacagaggtatgaaaataggtggagaagtgattcatttttctctttccccctagctgatagtttattgtcttttcttctatggtttatttagtgtcgttgatactactagatttgattgatagttgtaggacataatagccttgagttgatacctagtagttctttggtttaataaatatatgttcttcctttttttggcatttgaataattttgactcactctttctaatttaatgtttggtgccagagcagattgatcatcctgtcctgatcacagaatgtgtatgcaacccggttcaatctcgtagtaaaatggcagaacttctttttgagacttatggagttccatcaattggtactaatactttgcaacctacacaaaaaacttcatattttacaagtgaccttcaatagaaaactgatttcaatgcaaatttcttaagtacactgtttttcccattagggatacatgtctggattttgtgctagatgttgtttgtggaattttgcttctaaaaattatttgtgattctctgttctggcagcctttggtgttgatgtggcattcagctataaatataatcaacagcgaggagtttgtgctaaagattgtcttgctttgtgtcctggattcaacacaacccatgtgattccggtatatttttgttatttactgaattatagtattatatatgtcaatgaaatgagtttgtcatttctggggtagattattgtaatatcatccacctgcacatggttaaatttgtaaataggatcttgttttttattatcatcattgtaattatagtaattaatactattaatctgcttaaagttactcttgagcctgacagattgttgtctttatgagcaaaggttgataatgtgatgaagacaattattttattttgcacattatatgcctttattaagtaacagttgcatgtgttgtatcaatgttgtttttttgaaagggtatttttgtatcaatgattcaatgtacctcatttcctctttgctatagtagctgactacccagtcttatgtcagcaataatagtgttaatctgtataattatttttcaagatagcttggtaattaataaaaattattcattcatatgtgctgcataatacacataaaggaacttctccttatggtctttttagaagtttgaagtagataaagtaaaacaattgtaaatgtatccttgtaaaatagagtgcggctgttgaaaccaaaagttgttgctacttttatagaggatatgcccgtataggaaaaaaaattaagtattaaaatttaaaaataccataaaaataaatgtagaaatttaatttcttttaaatattgaaataaataaaaagaaatccaccgtacatgtgattgtgcatattggggaggcctgtatgtaataatggcaagttgtgatcagttctgacaactggaatattcaaatctatattgtctttagcaaccttgtcttctagataatattagagttgcaaaaataggatcaaaataaaatcaaccaagtgtgttggagtgttgaacttatttgtttcggtatttccagtttgtagatggggagcctgtttacgaaggatgctgtcgtactaatattggtggattccatgtgactgatcatttgaagcaactcctttcacttaaatatccttatcatttgtgagtatcaaatcatctgggttctgctactacccaactgaatgttaagttcgaagaatattttagattttattgaatgctcaatgcagggctagatttacatgggaaaaggttgaagacctgaagatggaacattgttacattgcaccagattatgtttctgaagctcggttgtttcaggtatatgtgtaaattgtttttctttttccaccaagttcctttattgtttctaaaactccatgaatgatctaatagaaaggagccaaggaagctgaagaaaaaaccagatattggcagattccttgggttccacccccaattgaggagcctccttccgaggaagagattgcaagaaaggcagcaataaaagagaaacaaggtcaaagtcttcgagaaatggctgaggcaaagaggtcttctgagataaatgaactggaaaatgaattgcatggtttagagtttctttggcatcagcttgaacaagtggaagagagcaaggttccatctttcctggcagaaactggctatggctctaggcaggagattgaatctgcacgtaatatagttatgcaatctttacagaaagcaaaaggtgaaccaaagaatgaacaagatgcaactgaaaaggttgatcctgccaccaatgattctcttattaacattcctgatgaggtgccacatgctcgacctctgaccaaagaagattttcagattgttcttggggtcgaaaggttccgatgtcctgaactattgtttaatccaaactggattgcggttgatcaggtaggattagatgagatggttggggtttcaataaggaggttgccatacaaggatgaaagcttggaagagagactgactagttccatacttgttactggtggaagttctcttttccccggtataattgaacgcctggaagttggaattcggatgattagaccttgtggcacacctataaaaatagttagagcactggatccagtaatggatgcatggagaggggctgcttcatttgcctcggacccacagttccatcagcaaacttttagtatactggattatcatgaaaaaggagaagactggcttcgcaattatcaactgcagtatactttgtaatatgtcattgatcacagtatagtgctgtatattgtctagaattttcgaccatatatagtttagaatgtatattctcctgttgtataatcctttgtcttgcttttgctgaagctagaaccgggaacatcaacaaaagcatggtgctaaactgctactgttaatattttcaatcttgtagtataatcttgtgaatagcatatacttttgagttttgatattaattgatacaattatccgattggttttcgttatccactcatgggc

SEQ ID NO: 52 - DNA, 9709 bp, Glycine max
  source 1..9709: mol_type = genomic DNA
ttgcttgttacgatcgtatggacaggattcaaacagaacagagaacattgggtggtgttgtggcgtttggtgagttgagttcattctcaacatgtcgatgctgctcaggaaggtgtgggaaagggtgttatggagatctgattcttcaacgtcagcatcagcatcagcatcatcttcatcatcatcatcaccaccagaagtggcatgttctgacatgggcgagttggagctgctacccagtgacatcttgatgcacattctgagacttttgggtccaaaagaggctgcaaagttgagtgtggtttgcaaggctttgagatcccttgtgtctgataacagactttggattcactttcttcagacccatcaggctgagccctctggggattctgtcttctttgctgagaccaccttgagctatggctaccctcttccgtgagtattagtgttcttccttcgtcactctttcatggattctaattttgtgccttgatcggtgttaaatttggtggtgggttgtgcttgaaaatttgtatcttgatggatgttgctagtgaatttggtggattgtgattgacaaattgtgttttgatgggtgttgctagtgaatttggtggattgcggttgaaaatttgtgttttgatgggtggtgctagtttttgctgtgatggggcatgctcatggattgattgttgcttgtgagtttgatggattgtgtgttgatagagattggaattctgtgttttggtggttggtgaaagtggttattggtgtggtagtgactcaaattttttacctacacttgtgaatttgatggattatactgccagtgattggaattttgtgttttggtggttggtgtgctagtgattcaaattttgtgctttggtcagtcttgcatgtgaatatgatggattatgtagctagtgattgaaattttgtgttttgatgggtggtgcaagtgatgtgtgtttctttttgctatgatgggtctgatgtgctagtgatgattggtggttttagttatggttggtgttgcccttttttggtgttgtgtgccttgttgttttttatgggccgtgtgagtgattgttattttgtgctttgaatggtggtgcaagtgaatttgatggattgtattgactagtgattgaaatatgaaattttgtgctttgatgggtggttctagtgtttggtgttgtgtgctcgatttgatgggttttgcgagtgattgttattttgtgctttgaaatttgaacggtggtgcaagtgaatttgatggtttgtattgcctagtgattgaaattttgtgctttggtgggtggatctagtgattgatgttgtgtgctcaatatgatgggttatttatgtgattggtgtcgtgtgctcaatttgatgtgttgtgcatgtgattgatgttctatgctttggtggatcttagaagtgaacgtgattagtattctgtgattatgagtgtttttaattccctaaattacaggccctttgctggccattggccccaactatcattcaagcatatttatggccagagagcactggttcctggttctattatcatcgatggttagtcttgcaattttgttctgtgaacttatggttctcttgtgatgattagatttttttaaacttttctttttgtccattcttctctcaaggtggttctggctattgcaaatttggttggagcaaatacgcatatccatcagggcgttcagcaacatttttggtaatgattttgattgggactagcactagggctgtgtttaattagaatgaaaatagttgatgacatggttgaaaattgctatttgtctactgtctagtttttgctgtgcttgcacattgtcattttgactttgaccaagtagagcctcaaaatagaagaaagcacttatgcagatactaggcattgctttttctgtttttcagtttccactcacttggctgcatcttttccctcctttttgatgggcaggaatttggtaatattgagtcaccaatgtatactaggcttcgacatttttttgcaactatttataacaggtattgtgccattctgattctcccttcttgttgggtgaatggttacaactaactcttgataatcatttaagtgaattcaatccttattggtgtcttgtgttgcactttagcatatctatgtacatgtttagatgaattgtaccagggcaatcactttgttgagagggcagtattttcaatgattacttaattattatgacgagaaatgttcatacttatcatgaataaaggaggcataattgttttgttggaaatataacagcattttcaatgttgttcctcttcccaggtagcctagatactttgtatagctaggttcaatgcatcttaggaagtagtgataacttaattgctctcttttaaaatgtagttggcaatgattatctttgtaatacttgtaattataaatagatcattcagctgagtggtaattctcactcaggtacatacaaaaatgctttgtttctcattttctcacttgttttatgttgttggcaggatgcaggtgaaaccgaataaacaaccagttattgtttctgtgccaatatgccattatgatggtcagttacattttttgatatacttaagtggtgctactaagaaaagaaaaaggagtacattaagatttaagaactttatcacaattgttaaaataattttcagttttgacttcagctgtcatatttatttcatttctttgttgtacatagttgttctttgtttttttctgtatcagagaaaaaccacctttgtgactctggtatccctaaaatttggaactaatttgtttggaatgttccgttacagtcctatcattccatctgtcgttgtcagggatggataattggtctccaatccatgccctaaggcctaaaccattaaggtgatggcacaagctgtctcagaaatgtttgatcagctgccctctctctgagctttgtctctggggccttggcatgtgtcctaacaggcatcctatcctgtgaacatgtgtagcttaccctgtcatgttcccttgtttgccaccttcccatgattgtcaggatcccttgggctgcacttgtctattctgagatgctctctcactatttgtcaagtttgatgtgtttgggctgtttcttggtgttctttgtggtggtaatctctggtaattcattgttttggatcctgtatgacttttttccaatgagtacagcattgaggggaagagaagttgtattttggctggccttggtttttgtctcagaagcagtgtctgttctagatgtgttctggccacaatctttgtcctggatacagtctggacttgccatttccactcctataatttcaacgaataatacatagttctccttcctatatgattttcagctgtacaatgttgatctatttcctcatttcagataccgaatcagccaaagcatctaggcaacagcttaaagaggcaatttacgcttccttgtttgacatgaatgttcctgctgtttgcgccatcaaccaggtaatacatatttatgcttccttgtttatttgacatgaatgttcctttgcattgaatatatacagaacttgtttcggctatgagtataatgagtcactggtaaagtaggattgtcgtatttagttctcctgctgaagttgtaagaaagtgagagcgccaaagcacttgattaagcgcagttgaattgttactctctgttaacttatgagtctagacattagagcaaagaaccttgtttacaacctttcaaatcattatctattgaatgtaattgtgcatggctttttgccttatgaattatgtatgcttctgttatttcttgttatttccatgtgtttattatctgtattgtaaaatgtaggccactctagctctgtatgctgcaaaacgaacttctggaatagttgttaatataggttttcaagtcacgtctatagttccaagtatgctctctgtttctctttctcttgcctttttgtctttgtataattcttaaatttgttgcataaagtttctgtaattgttcttgaaatgtaaacagggttcacttgaagtcaataatgtttaaatgtcaccactttgttttgatacataaagtgttttttgaatgtcagaagcaaatgactatttgtctacttctttttcttctgatgtgattgtgacctgcattatcttttctcagttttaaacggtaaagtaatgcgcaaggtgggtgtggaagttgtggggctgggagcactgaaacttacaggatttcttagggagaagatgcaactgaataatttaagttttcaatctttgtacactgttcgcacattgaaagaggtattgatattcatctttgtggtctgaaatattcatctttgtcaatcagttatggtttggtagcacggtgcatctaagaggacagcattggaccctacattacttatgaaatatagtctacaaataaatatttacttcaatttcttatagctttctttggttggattagatcttggaatttaaaatatttgacattttttaacacctagctcattggattgataaagatatgatattctagtcttttccctttctttctctcttactccatgtctgttctccaaaagctgccttatatgtcctgattcctggtattagcatgctaatatttaattatttaccagtttttaaaaaatagttattaaggagttatatcattagatggtaggctttaagaacttggtcattgaagagcagacagggcatccaatctccttcagctagaggaagatatttctatctgatgataatgtgcaaaggtttaggtttaactttgccttgttggacagaattttcttcatttggttgttgtaggcatttgaaaattgaaattaatgatcatcctcataaaaagcttttcacacaatgaaaaggagaggatctttcttgtctctaatggctttaattctagaggcaaatttgtatcgaccaaacaattttttggcaattcaagaccttgtgttgtgtgagaaggacatcaaatagcctaggggagacattttaaataagccctatttttctttgcttatccaagaatttagcctactaagatttaaaatcattccggggcctctacctaagcttaaacatttaggagaattggttctagagatggaacgagtgtgtctatgacccaatgattaggagttcaatccttgttgccttcatttttcataattaaattagatttcagcaccaagtaaagtggatctgtatcttgtccttgcttctagcctaaggggctcttgtgtgagactgtgaggtgtgtatgtaaccaagtaatggcctcaaaactccagggggtggggtttaacaattttagcaaattttcacagacaacttttgcaaagatatatttttatgaaagagataaaacttttataaaagtgaatgaatggatgaatgattcagtgcacaaagaggtttagaatcaacctagagagcacatcaaataataaagttatacataagtaaaggagttaaggtcggtgggtctgtgcattatccatgcttcaagcctaaaaggacttgtgtggaggggcaagtcaaaaatataatataaaaaaattcatgtgtcttcacataatagcttaaatatttggaatagttgattcttgagtcattatagagccttgtaaactatatggtggagtcagctacttgaaccaagagcgggagctggaaaggtttagggtactcggttgttgtggttcaataattggaacagcatcttgtgcattaccaggtaagtaatacatgtaaatcggtacttgctgtcgaaaaacctatggtagataagattcatcttagatcaacctagcacggtatggttggcaaatagctatatcccttaagcatgtgatcttaggttagatctccaagttcttgtgtatataataacatttgttgggagaaattaactcattaaatgcatcttaataccttgagggattagtccttgactcttgactaggagataccttgggttcacaaataattaaaaaagattcatctgagagtaacatgggattttactatttgaacaaatccctcattatatctttccagttgtttttgtctttttttacccttttccctttttccactgaagtgtggtgggaatgattagtatccatcttgcagatttcttttacttaaatgtcttctcacagaagttgtttggtatttttttcgtttgcatggcaacagaatctatgctatgttgcacttgattatgaagctgagctattgaaagatacaaaagcatcatttgaagctgctggagaaggatggtttaccctttcaaaagggaggtttcagacagcagagatcctattccagccacatcttgccggagtgtgagttcttttcttatttttttatttacagttctgacagattgatcatgcatatttgcttcaataatagaaatactctaccttgattttggccattcataaattagcacgtgataccattgcctaatttgatggatggctggtaaaagtgcatttaacttgaaaataaataaaattcatttttcttttattcctacctcccagtgaacttgggtgttccccatttgcattctataggttagtttgtcaatcataataattaaacaatcccttttttaggtagtctcaaaaagacaaaagtgaggaggtgttaggaaccaagaattgaaatgaggaagaaaataaaagattttattgactagtaagaaaaaaacagaaaataggagagaaaactctcctccaagggtttcccctttacaaaggatttctcctttcacaaagagctaatgctcaatctacaaatgataagatccccctctctcctatccgtcttcctctatttaaatccaataaacccctctaactaactaactcattagtagtctaactatattaactaactctttcttctccttatatcctaacaggaggttttgttaaaatgcgaataatgggaatgacttaaactatgataagtcatgcccattattgtctaacaataacaacaaaaataaataaatatgagatattcaatatagaagtgagaggaaaactataatatatttagcctctgtcttgctaataaatgtgtaactctcagaaatctgtctaaagttgactggaccaagattattaaatcgagattcgaatcatgaattttaagacctattttttaaattgtgaaccgaatcttatcataaatcataagatacatgatcaataattaaaaataacaaaatatactttcacataaagatattagtcaagtgaataacccaatgcataaactgaaacagaagctgatatatcatgaacgaacttcaaaataatcaaagattcaagtcataaatcaaaatgacaaaaaaaacagtgactagctgcagaaaattcaagtgttgaacccctaaaaaaaatcaaatgagatggcaaaatgcagattcctatttcccaattcctatgcttagattctagtacataatctaactatttgtgtctcatttatcattgtcaagatcaatgtcatttagttcatcctcatcttctgatataaaatgttcttcctcttcctttgctgccatttgttctttagttttattcatagcttaacagatgtaggatatggcaggttctgggtcatcatttacaaacattaaaaccttcacaaatggaatcacacagtttgagcaatattggatggatttctgaaatctaatgtaacataaaactatatttgtcacctgtactagcatccagaggaccaacttcttcaaaacattcttgactgtttgcctttggctttttgatcttctaacagcttcaaaaacatctctctaacttcatcaggaacaagcagcactaacattgtcctttgttgtgggaaggggatgcttcatccttggtcctcacaaccccaccttgacaactatgttaacaatacttggacttaactaaaagcctgtgtggaggagcactctcactgtggctccatgcgacatcggttttcttgggtttttacccattaccccactaaaaaattatgcaacagcaacagaaagtgaaaaggaacaacacaacctattagaaaaatagtggaaagggattggaacggtataaaggaagccactatggaggagacatgaagcaccaaaagcaatattcttacttgggttgggttcataagagcatccccaactcataagagcagccccaactcgtgtttcttccgatacagaagtgattcagcaaatggtttggtgtcaaaaacaagaattattatgatctatatcaaactctaaagattttgtaatgatcaatatgcaactctaactacactgcaagtcactggacataatgtggttactatattggttttttttccctttttgttagtttgttttatatattccgtgaaagcttgtgttgcactcattttttggtttaggcaagctatgggtctgcaccaagccatagctctttgtgtggaacattgccattctgcagatttagcatgtgacagtgattggtacaagactatagtcttatcaggggggactgcatgcttacctggtttggctggtaaatattcttttttatttgtgacatgacattttatatctttgcgaaatgatgaaatgaaattaaacacctgtagtggggtaatggctacttctaattctactacttttgggaccattctggtacagaaaggatagagaaggaactccatgccttacttcctccctacgtgtccaatggaattagagtcatacctcctccatatggtgctgatactccatggtttggagcaaagattgttggcaatgtgagtcatactacctgtgatacatactcaaatttagtttgctgtatatgcattctattttgggtagtgattatggcaccgttgagaattatccactcagtgtccactcctctcacacggtttatacacgtgtaaatatagttaattttgccttaaaggtgattaatagtgttattaagatttccaattatggttactgtgcctaaaaagtggttaacagttccgagtggatgctgggtggacatttttagccgaacgttgaccattttccatatattttgtagtaaacgtaataaaaaagagtctctgcttcaaggctaactgtctttgaattgtgtacagttgagcacctttcctggtcattggtgcgtcacaaaaaagcagttccgtcagaagcctagactcaacctcatatggtgattgttgtgatacaaaatttatttcctcaattatgcaccctcatccaaagaggcaacaacagaagatgtgaattttagcaactgcttttgtatgtataagtatattatgatttccttcttgaaacgaagcctatagttaacattcaggttgttaagaataatgtaataagattcaagactaaaccacaagtgtgaagaaactgttaataatatagttgaagagcaaaaccacaacgtgagaggttttttgtaattagaaaaatgcctagacattggaataatggaatccatctctggttcttccattcaattttatgaaatgagatggtccttttaagaa

SEQ ID NO: 53 - DNA, 6085 bp, Glycine max
  source 1..6085: mol_type = genomic DNA
aaaaaaagaaaatggacactgttttacttcaatgagccgtttctacttcgcccgatccgtatagtagttcgggttacccgactgggacggagctcaccatgtctgttacttatgttgttcaacatgcagaggttgtagtgtcgccgaaacacacaactaaagccacttcttcttcagtttcaccgacacaatgcctttcatctccaaaattcagcgccaaaccgattacaccctctttggttccgccactcccatcgtcatcgacaatggcgcctcctatttccgcattgggtacctcctcgaaccctaatttcgcctcaaaaaaaatcgaaacttttatttctggacttctctgtttttgaaatcagtttttgattatggggctgttgattttaacgttaaagtttgttccttttgatgaattgccagatgggcaggagagactcaaccccgtgttgttttccgcaacattgtccaaaggccacgccacaaaaccaccggtatcgtatattctacattttcaccatgttttcttgttcttctccatcttagtcactgtgccatgtatttgtttgtgtttatctgaaaatgtttccgtagtgaaactgtgtagttaatgctgatgttgttgtccccaattcttgttgtcatggtgcattttcattagtttattaactatattttaatttcgtaaaagaataaaataggaccgagatatatttattgttgtgagtgaatatagccttttatatctaagaggaaactgtttcatgagctgataaagccaacaaaaaggcaatttgccgcatgttgaataattatttttttttgaaaatttttttgtaccacaggagaaactgtcactattgttggtgaccatgatccagcattactgaaatactttgactgtactcgctctggaccccgctcagcatttgacagcaatgttgtttaccagtttgaaataatggaatatgtaagttttccctcattacaattttgtgagtaaaggagaggtggttttttttagtcgtttctatatgatcgttattatgcaattagaattcagttcctgatgatcataagctagtctgtgatttgtgttggttctgctgtgtgtgttatatgcatgtgaagttacacttctatttcaggaaattgtctatttgggtggctgcattttagaattagagattatacttgagtgagaacatatggtgttgccacttgtgttattgctatatgatacatttggattaatgatatgtctttgttgtttagttgttgatttgtccaaattgaacaccagaatgtgtagtaacttttaaggatttacattttcaactatttcaaaatgtttttggaataagtatccaaattccaaaatatagtctctttttctctgcatggattctatcttttgaatgttgctgatatggataaatattgtttaagaattcaaacatggccaaaaatcttgttttttgttgcctagagtatagacctcgtcatttcttcaaggtcctacagaatgataatttcctgggactatctcacagacagtgccatagtgtggtgccttgcaccaagcaatgccaaggtccttttcctagtatataataaatggaagaactattctcctagtatgaggcaatgtatgaattgatgtgtgacagtgaggtttgataggtccactagttggaaaggatgtgtactactctggacttaaatataaggaaaaaaagacacatttctcttggtctcaaatataaaaaaaattcaactaactttacctcatttaatgctactatatctaatatacccttcatttaattgagatcttagttccaatgactcttttttattccttatatcaagttccaatgaagggtaagttcaggaaaattcaatttttaattgagattggtgcaattaaatgtgattaactaactttcttagttagtgtgaatcaatttttttttttttatatttgagaccggagggaataccatattacatattatggaaatagatcatgcatgtatacaggtgtatgttttcattaattctgaaaaacatgtgaaggaaagccttactgacatcttctttcatctatagattctggactttggatttgacaggttgggtgctacaggatcagaggtatgcccataagtggagtagtgattttcatttttctttcttgagcctttagttttttatcgccgttatgatgacattttaaactccaatagactactactactaattttcctatgctagtaaacttagtggtctgtagttacctaggagttccttggtttgatgaatacagattcttctcttttggaacttctacaattaaaattatttaactcactcttttctatctttatgtttaatgtcagagcagattgatcatcctgtcctgatcacagaatgtgtaagcaacccagttcagtctcgtagtaagatgggagaacttctttttgagacttatggagttccatctataggtactaatactttactaatcctataaaaaagaaaaattaagcacgtcatcttcttcaagtggcattagtaggaactgtagtgttgacttgcctatagtcttatgcccaatcttgtccaccaggctattcataaaaggaaagccaatttctaagaccatgacatcttggcacatagttgtcactagtttggacctcaacatgggcacatgtttatctctattcaatgctagatgttgtgcacataattttattgacaatgctatctatgctgctctgtcttggcagcctttggtgttgatgcggcatttagctataaatataatcaacaacaaggtgtttgtgataaagatggtcttgctatgtgtcctggattcaatacaactcatgtgattccggtatgctttttttgttatttacttctaaggatcttttatccaaaggaaaataatttttttcatttctgtttgtcctcacatgcattttcagatttgtagatcacaaatcattgctggtaggatttacatagccttatcaagtgtataaagtattataattctttataatcattttttttatttttttatatttccagtttgtagatggggagcctatttataaaggatgctgtcgtactaatattggtggattccatgtgactgattatttaaagcaacttctttcactcaaatatcctcatcatatgtgagtaaagagtcatcctggctttgctatcgtcaatctgattgcttaatacatattatttcgtagattttattatattctcaatgcaggactagatttacatgggaaaaggttgaagacctgaagatggaacattgttatattgcaccagactatgcttctgaagctcggttgtttctggtaagaaaaggttcttctttttaatcttaagttcatacaccatttctatttttctacaattttacttcattaatggtttgacagaaaggagctagggaggctgaagaaaaaaccagatgttggcagctcccttgggttccacccccaactgaggagcctccttctgaggaagagattgcaagaaaggcagcaataaaagagagacaaggtcaaagattacgagaaatggctgaggcaaagaggtcatctaaaataaacgaattggaaaatgaattgcatggtttggaatttcttttaaaacagcttgagcaagttcaagacagtaatgttccgtctttcctagcagagaccggttatgtctctaggcaggagatagaatctgcccgtactaaagttacacaatccttacggaaagcaaaaggtgaaccaaagaatgaacaagctgaaactgataaagccagccctaatgctaatgaaaagtattctcttataaacatccctgatgacatgctcaccccagaccaggtcagttttagcatacctcatgcatcattagattgaacttgctgtcgtcttcccccttcaaatgtacttgtaatcataaatttcttgcttgttcccatatttgctttcggtctttaatattccaaataatttctctgcatgttgctctctgtgccttatgaagttgacaatgtttggtgtgctctgttgatagctcattgaaaagaagaaacagttatcactgaaatccatgtctgaagggcggcaacgattaaaacagaagcgttatgaagaggaattggagcgacaaaggaaacaactgctagaggaggagacacgcttgtatgtttcatgctttaatttattcagtttaattgaaatcactttgttgcatatttatgtgagttaagagctcatcatttcaacctagtaaaacagggaaaaatgaggaagcaagagcattcactttctgtctaatttaaggttaccaaatgccttagcagggagaaaagttcatactatactattataccttagttaatgttaggacatgacatttgtacaaagcatgactaatcttgacaaggcttgaatacttataaattatactctattatgctttaaaataattctgattgtctttttgcccttattgtagagagaacccagagctttacttggaacaattgcgtgctagatacaaagacctttcagtgaaagttgaccaacgaaaacggctcaagacaaatggaggtcattctaacggaaataacttggccggtgccattggtcgtggtgagagactcaatgctgttcaaagggagagaatgcgcctcttgacaactgctgcctttgatcgcggcaagggtgaggatacatttggtgccaaagatgaagattggcaactttacaaattgatgagcaaagatattgatgatggtgatgagggaccagatgaggatgatgcagagctagcccgcatctcttcaaggctacaggttagctttatgtctttcatctgttactccctccatccctaaatataacttttttaactaatttacacccttgaagaaagttggttaatatagttggtagtattaaatttgttaacaatttgtattattttgcctttattaccctaaagtttattggaactataatctctctctttccacttaattgcttcacgcctaattaattaatgagttagtcttcttattcaatccttataagagagataatatatttatcttttaaatatataacatttattgtaaaataataaatgatatttgagtcaaaaaataattaatgcaaaagacagcttgaaaagagtcttataaaaagtgacaaataaaaactgaaaaaatagtcttatatttaaggacagagggagtaataattatgatttgtggatgcagtctccatttgaatggttgtgttacatataggctcttgatgactcacaaatcttgctggattgttgctttgctgtaggacttggatccaacatttgtgcccaacaagtcagaagcaggtagctctcaacctgctgctgaggcccaacgcgcccgtcctctcaccaaagaagattttcagattgtttttggtgttgaaaggttcaggtgccccgaaattttgttcaatccaaactggattgcggttgatcaagcagggttacacgagatggctggggtctcaataagaaggttatcatgtaaggatgaaggcctggaagagagactcactagctccatacttgtgactggtggaagttctcttttccccggcatcactgaacgcctcgaagccggaatccggatgattcgaccatgtggagcaccaataaaagttgttagagcactggatcctgttatggatgcatggcgtggggctgcagcgtttgcatctgccccacaattccatacacaaactttcagtaggatggattatttcgaaaagggtgaagattggctccgcaattatcagattaaatattcatcgtaattgaactcttaacacagaacttaatgtcttgaacatcatacctcaattatagacaatattatccagtcatatctaacttgctgctcatgctgttgctgaagctacaagtagtatgctgttgatattttcacttttcagtatgatgaatagcatccatgtgggtttttttagtt

SEQ ID NO: 54 - DNA, 5655 bp, Glycine max
  source 1..5655: mol_type = genomic DNA
cagtcttgcatggcctaacaaaaatgggaaaaaaatgaacactgctttacttcaatgacccgtttctgcttcgcccgacccgtattgtggttcgggtaacccgatcgggtcggagctcaccatgtctgttacttatgttgttcaccatttgcagaggttgtcgtgtcgcagaaacacacaactaaagccacttcttcttcagtttcaccgacacaatgcctttcatctccaaaattcagcgccaatccgattacaccctctttggttccgccactcccatcgtcatcgacaatggcgcctcctatttccgcattgggtaccttcttgaaccctaattttgtctcaaaaaatcgaaacttttattttttttggtttctctgtttttcaaatcagctcgtgatggggttgttgattttaacgttaaactttgttccttttggtgaattgccagatgggcaggagagactcaaccccgtgttgttttccgcaacattgtccaaaggccacgccacaaaacaaccggtatcacatacttagttactgtgtcatgttttattgttattctccatcttagttactgtgtcatgtatttgttttgttgtttgtgtttgtctgaaatgtttctgcagtgaaactgtgtagttaatgttgaagttgttgtcccaattcttgttgtcgtggtgcattttcattagtttattaactatattttaatttcgtaaaagaataaaataggaccgagatatatttattattgtgactgaatagtcttttatattcaagaggaacctgtttcatgagctgataaagagccaactaaaaggaaatttgtcgcatgttgaatatttttttttttttgaacattttgtaacacaggagaaaccgtcactattgttggtgaccatgatccagcattactgaaatactttgactgtacacgctctggaccccgctcagcatttgacagcaatgttgtttaccagtttgaaataatggaatatgtaagttgtccctcattacaattttgtgagtgaaggagaggtagttttttttttagtcattcctatatgattgttattatgcaattagaattcagttcctgatgatcatatgctagtctgtgatttgtgttggctgctgtgtgtgttgtatgcatgtgaagttacatttctatttcaggaaatggtctatttgggtggctgcatgttagaatgagagattttacttgagaacatatggtgttgccacttgtgttattgctatatgatacatttggattaatgagatgtctttgttgtttagttgttggtttgtccaaattgaacaccaaaatgtgtagtaacttctaaggatttacattttcaaccatttcaaaatgtttttagaacaagtatccaaattccaaaatatagtttcttttcctctgcatggattctatcttttgaattgtgctgatatggataaatattaagagttcgaacatggccaaaaatcttgttttttgctgcctagagtatagacctcggcatttcttcaaggtcctacagaatgaccattcctgggactatctcatagacagtgccatagtggtgccttgcaccaggcaatgccaaggttccttttcctagtatataataaatggaagaactattctcctagtatgagataatgtatgaattgatgtgtgacagttaggtttgatagttcacaggctaaggtcacaagctgaatatagaatcataggcttttgacaactagttggaaaggatgtgtaccatattaaatattatggaaatagatcatgcatgtatactgtgtatgctttcattaattctgaaaaacatgtgaaggaaagccttgctgacattttctttcatctatagattctggactttggatttgaccggttgggtgctacaggatcagaggtatgcccataaatggagtagtgttttccatttttctttactgagcatttagtttgctatcgtcgttatgatgacattttaaattccaatagaccactactagtaattttggtatgctagtaaacttagtgatctgtagttacctaggatttccttggtttgatgaatacagatttttctcttttggaacttctacaattaaaattatttaactcactcttttatatctttatgttttatgccagagcagattgatcatcctgtcctgatcacagaatgtgtatgcaacccagttcagtctcgtagtaaaatgggagaacttctttttgagacttatggagttccatctataggtactaatactttattaatcctatcaaaaagaaaaataaaacacttcatcttcatcaactggcattagtaggaaatgaagtgttggcttgcctattgtcttatgcccaatcttgtccacctggctattcttaaatggaaaaccaattactaagtgaagcccttcaagaccatgtttgatgtcttgtcacatagttgtgactagtttggaccccatcatgggcacatgtttatctctattctatgctagatggtgtacttgtaattttattgacaatgctatctatgcttctctgtcctggcagcctttggtgttgacgcggcattcagctataaatataatcaacagcaaggtgtttgtgataaagatggtcttgcaatgtgtcctggattcaatacaactcatgtgattccggtatgctttttttcttatttacgtcaaagggtcttttatgcaaaggaaaacacttatggtttctgtttgtccttacacgcattgttacatttgtagatcacaaatcattgccggtaggattttcatggccttatcaagtgtataaagtgatataattctttataatcattttctttattttttatatttccagtttgtagatggggagcctatttataaaggatgctgtcgcaccaatattggtggattccatgtgaccgattatttaaaacaacttctttcactcaaatatccttatcatatgtgagtaaaaatcatcttggctctgctatcatcaaactgttgctaaatagatatcatttttttagagtttattatgttctcaatgcagggctagatttacatgggaaaaggttgaagacctgaagatggaacattgttatattgccccagactatgcttctgaagctcggctgtttcaggtaagaaaaggttcttcttttcaatctaagttcatacatcatctctatttttctatgattttacttcattaatggtctgacagaaaggagctaaagaggccgaagaaaaaaccagatgttggcagctcccttgggttccacccccaactgaggagcctccttctgaggaagagattgcaagaaaggcagcaataaaagagagacaagggcaaagattacgagaaatggctgaggcaaagaggtcatctagaataaacgaattggaaaatgaattgcatggtttggaatttcttttaaaacagcttgaacaagttgaagacagtaatgttccgtctttcctagcagcaactggttatgtctctaggcaggagatagaatctgcccgcactaaagttacacaatccttacggaaagcaaaaggtgaaccaaagaacgagcaagctgaaactgataaggccagccctaatgctaatgaaaagtattctcttataaacatccctgatgacatgctcacaacagaccaggtcagttttagcatatcgcatgcatcattacattgaacttgctgtcttcccatcctttaaatgtacttgccattgtaaatttcttgcttttatccatatttgttttcgatctttaatattccaaataatttttttgcatgttgccctctgtgccttatgaagttgacaatgtttgttgggtgtgctctgttgatagctcattgaaaagaagaaacagttatcactgaaatccatgtctgaagggcggcagcgattaaaacagaagcgttatgaagaggaattggagcgagaaaggaaacaacagctagaggatgagaaacgcctgtatgtttcatgctttaatttattcagtttaattgaaattactttgttgcatatttatgcaagttaaaaagatcatcatttcaacctagtaaaagggggggaaatgacaaatcaagagcattcagtttctgtctaatttaaggttacttaatgccttggcaagtgatagaagtgcatactatactatttataccttagttaatgtcaggacatgacatttgtacaaagcatgactgatcttgacaaggcttgaatacttaacattagggcattggttaaggaactaaaatgagaaagtatttattgcggaaatcataggagagcataaaaaaagtcatggacaatgcaataaaaacatttctccttttaattccttaaccactgccctaaggcactggttaacatttgcctataaattataatactctattatgctttaaaaaaattctgattgtcttttttcccttattgtagagagaatccagagctttacttggaacaattgcatgctagatacaaagacctttcagagaaagttgaccaacgaaaacggctcaagacaaatggaggtcattctaatggaaataacttatccggtggcattggtcgtggtgagagactcaatgctgctcaaagggagagaatgcgcctcttgacaactgctgcctttgatcgcggcaagggtgaggatacatttggtgccaaagatgaagattggcaactttacaaattgatgggcaaagataatgatgatggtgatgaggaaccagatgaggatgatgcagagctagcccgcatctcttcaaggctactggttagctttatgtctttcataataatgctaatagttatgctttgtggatgcagtatccatttgaatggttgcgttacatataggctcttgatgactcacaaatcttgctgaattgttgctttggtgtaggacttggatccaacatttgtgcccaacaagtcagaaacaggtagctctcaacctgccgaggcaccacgtgcccgccctctcaccaaagaagattttcagattgtttttggtgttgaaaggttcaggtgccccgaaattttgttcaatccaaactggattgcggttgatcaggcagggttagatgagatggctggggtctcaataagaaggttatcatgtaaggatgaaagcctggaagagagactcactagctccatacttgtgactggtggaagttctcttttccccggcatcattgaacgccttgaagccggaattcggatgattcggccatgtggagcacccataaaagtagttagagcactggatcctgttatggatgcatggcgtggggctgcagcgttcgcatcagccccacaattccatacacaaactttcagtaggatggattatttcgaaaagggtgaagactggctccgcagttatcagattaaatactcattgtaattgagttgataacacaggacttattaatgtcttgaacatcatacctcaatttagacaatattatcctttcagctaacttgctgctcatgctgttgctgaagctacaagtagtatgctgttcatattttcacttttcagtatgatgaatagaatccatgtggtttttttttaattgatgaaa

SEQ ID NO: 55 - DNA, 6016 bp, Glycine max
  source 1..6016: mol_type = genomic DNA
tccccgaagaaaagtgttgaacgcgagtagacgagagagcgaaagcacactcaaggaaaaacagttaaaacactgctagtgttagttcatctactcatgctcttcctcgtcgccgatacacttctccgtcgacccaaccaaaccggttcggtttaaccaagcggttctcttcatctccgcgagccacttcgctcgttcacgagtcctccagaagaaccaaaattcagttcgagaaaccactgcgccgtgaacctcactaatcactatcactatgcctttcatttccaaaattcagcgtcaatccgattacaacctcttcgattccaacactcctcttgtgatagacaatggcgcctcgtattttcgcatagggtattccactattctcctctcgccaaccctaattttcactgttcctttctctgcgaattggtttttttcggttaatgctcgttttggttttcgtgaattattatcaggtgggcgggagagtctgaacctcgtgttgtttttcgcaaccttgtgcaaaggccgcgccataaagtaactggtactgctttctcaccttttttaactttgcaagattttgtttaggtttttgtcaataattatgcataattgactgaatctttatgcttgtctgttacgtaaagatacgagtatttaacattagatcctatcatagattgcccttggttaatgagtgcttctaatttctaattacttgaaagagtgataaagtttttttattgaaaaaagaaaatatttataccgtattttttatatgataaatgatttctttcttaataaaaaaacttactagtattttttaccactggttgctccagtttaaacaaagatcttaagttcgaacattgagtgtataattgctttaaatagtcggagagtgttttgctgcacgtaatggttctacttggctcgagcataattgtgtcatgtggaggatacatgtgatcctataacaaaaaaaaaaacttactattagcatcttaaaatcagctttaaaaggactgatataacattttcctaaataaattttgttttcaatataatgaatattttattttatttttcatacatttgtttcttagggcattggctaacatttagctttaatatgtatttatgtaaaatcttgttgctttgtacgtttgcattgtttgttgtggatactctttcatttgataaataactaggtcctattactcctatatgtttttgttgtttctgctttaatagctgtattattaagacaatttctgtcccgacattggtcctttttgcttgcctacaattgtgtgccgtactgaaatatttgttcttttacattgtacaacataggagaaactgtcactattgtgggtgaccatgatccagcattactgaaatactttgactgcactcgctcagggccacgctctgcatttgacagcaatgttgtgtaccagtttgaaacaatggaatatgtaaatttcctcttgtcacaagtttaacttgtatgcttcattattttagaagaacttgttgagaataacattactgacattttttatcacacagattcttgattttggatttgaccggatgggtgcaaatggaacagaggtatggccataggtggaaaagtgattcatttttctctttccccctagctgttagtttattgtcttttcttctatggtttatttagtgttgtcaatactactagatttggttgatagttgtagaacataatggccttgagttgatatctagtagttctttggtttaataaatatatgttcttccttttttggcatttgaataattttgactcactctttctaatttaatgtttgttgccagagcagattgatcatcctgtcctgatcacagaatgtgtatgcaacccggttcaatctcgtagcaaaatggcagaacttctttttgagacttatggagttccatcaattggtactaatactttgcaacctacacaaaaaacttcatattttactagtgaccttcaatagaaaactgatttcaatgcaaaattctcaagtacactgtttttcccattaggggtacatgtctggattttgtgctagatgttgtatatgtattttttcttctaaaagttagttgtgcttctctgttctggcagcttttggtgttgatgtggcattcagctataaatataatcaacagcaaggagtttgtgctaaagattgtcttgctttgtgtcctggattcaacacaacccatgtgattccggtatatttttatgttatttactgaattaaagtattatatatgtcaatgaaatgagtttgtcatttctgttgtagattattgtaatatcatccacctgcatatggttaaatttgtaaataggatctcgttttttattatcaccattgtaattatagtagggggtttttttggtgaattgtaattatagtagttaatattattaatctgcttgaagttactctcgagcctgacagattgttgtctttatgggcaaaggttgataatgtgatgaagacaattattttattttgacattatatgcctttattaagtgacagttgcatgtgttgtatcaatgttgttttgaaaggatatttttgtatcaatgtacctcatttgctctttgctatagtagctgattacccagtactatatcagcaataatagtgttaatatgtataattatttttcaagatggcttggtaattaataacaattattcattcatatgtactgcataatacatataaaggaaattctccttatggtccttttagaagtttgaagtagataaagtaaaaaattgtaaacgtaaccttgttaaatagagtgcggctgttgaaaccaaaacttgttgctacttttatagaggatatgcccttatagggaaaaaaataagtattaacatttaaaataaccataaaaataaatgtagaaatttaatttcttttaaatattgaaataaatgaaaagaaatccaccgtacatgtgattgtgcatattggggaggccagtatgtaataatggcaagttgtgattagttctgacaacaggaatattcaaatatatattgtctttagcaatcttgtcttctagataatattagagttccaaaaataggatcaaaataaaatcaaccaagtgtgttggagtgttgaaattatttgtttgggtatttccagtttgtagatggggagcctgtttacgaaggatgctgtcgtactaatgttggtggattccatgtgactgatcatttgaagcaactcctttcacttaaatacccttatcatttgtaagtatcaaatcatctgggttctgctactacccaactgaatgttaagttcgaagaatattttagattttattgaatgctcaatgcagggctagatttacatgggaaaaggttgaagacctgaagatggaacattgttacattgcaccagattatgtttccgaagttcggttgtttcaggtatatgtgtaaattgtttttctttttccaccaagttcctttattgtttctaaaactctgcgatctaatagaaaggagccaaggaagctgaagaaaaaaccagatgttggcagctcccttgggttccacccccaattgaggagcctccttccgaggaagagattgcaagaaaggcagcaataaaagagaaacaaggtcaaaggcttcgagaaatggctgaggcaaagaggtcttctaagataaatgaactggaaaatgaattgcatggtttagagtttctttttcatcagcttgaacaagtggaagagagcaaggttctatctttcctggccgaaactggctatggctctaggcaggagatagaatctgcacgtaataaagttatgcaatctttacggaaagcaaaaggtgaaccaaagaatgaacaagatgaaactgaaaaggttgatcctgccgctaatgagaagtattctcttattaacattcctgatgacatgctgacccaagaacaggtttgtttttgtatcagacagatgatctcatccattattaataaattgagctgtgtgtaccacattttcagcttattttgggaaagtaagcatttttttttgttttgttttgttttgttattgatagaagcttttcttaaaaaacacttgggaaataagctttcccaaacatgtgataagtgtacttgtacaatttttttctggagccacatttgcttacaatcttaatatgattaaatttccaaatatttctttgcatgatgttctttgtgctctataaggttaaacaatattaattgtattttctatattgatatttgacagctcaatgaaaagaagaaacagttgtcactcaaatctatggctgaagggaggcagcgattaaaacagaagcgccatgaagaggaattggaacgagagagaaaacaacagctagaggaggagaaacgcctgtatgtttgatgctttagtttctttatttatacattgtttgaggcttgcttatgtaagtaaaatagttttccctcatattaaactaagtaaagtgggagaaagcaagaaaaaagagcatgtattctatctaataaggattaatattaatattattattattatataaacttttttttttgtctccttactgtagggagaacccagagctttacttggaacaactgcatgctagatacaaagacctttcagagagacttgaccaacaaaagcgacttaagacaaacggaggccattctaatggaaataatctgtccggtggtgttggccgtggtgaaagactaaatgctgctcagagagaacgaatgcgtctcctgacaactgcagcttttgatcgtggtaagggtgaggatacatttggtgccagagatgaagattggcaactatacaaattgatgagcaaagattataatgatgatgatgagggacctgatgaggaagaggcagagctggcctgcatctcttccaggctccaggttggttcaccttaaaggataaaatcccttaaaactaatttatgattgtacttgtacaagatcatcttgtatatgggtcttgatttacaattcacaaaaaaaatctctgcattgttgatttggtaggacttggatccaacatttatacccaagttagaagctggtatctcccaacctgctgagttgccacatgttcgacctctgaccaaagaagattttcagatttttcttggggtcgaaagattcagatgtcctgaactattgtttaatccaaactggattgcggttgatcaggtaggattagatgagatggttggggtttcaataaggaggttaccatacaaggatgaaagcttggaacagagactgactagttccatacttgttactggtggaagttctcttttccccggtatagttgaacgcctggaagctggaattcggatgattagaccttgtggcacacctataaaaatagttagagcactggatccagtaatggatgcatggagaggggctgcttcatttgcctcggacccacagttccatatgcaaactttcagtagactggattattatgaaaaaggtgaagactggcttcgaaattatcaactgcaatatacattgtaattgatcacacagtatagtactgtatattattttctataattttctaccacagtttagaaagtatactcctgttttataatccgtttgtcttgcttttgctgaaactagaacgaggaacatcaacaaaagcatggtactatactgctactgctaatgttttcaatcttgttaatagcatgtacttcgttgatataaactgattcaattatccgtttggttttcgttatccactcaggggctggtcagtgccgttttgtgcgttgtacattgtggacttacgctccatattatcgactctcaattcaacaaaacttcaccacccttttatttattattgtttaaaggagatattattatatgataaagttgtgtttgcgacaaaa

SEQ ID NO: 56 - DNA, 14348 bp, Glycine max
  source 1..14348: mol_type = genomic DNA
ccataacccacccgcggattagagtcccgtgcccgattcatggacttaagcgggaatagccacccctactaggaacctttattaaacaaatttgtaggagaaagtgttcctcagttttgatctgagcaagagcagagaaaataacaaaggctaaaaggaaaaaaaacactcacacacacaccaaatttcaaaacctttgtcactctactcactgcaactacaacatcctctctttcccatggtacaatttatctgtttatgttaccgttaccctttcaacaattttgttctcacatcatattggggatgttctcatgtcacaggattaccttaagtccgcgcttccttctcaaataatgtcagaacgaggctccaatctggttgttatcaacccaggtatgcaaaaaattcaattttgttcactacccatttaccacattcttcccaaaatcaacatcaagcacttaaatattctaactttgttgatactgtacccattattactcaggttctgcaaatgttaggattggcttggcttcacaggacaccccttttaatattcctcattgcattgctcgccataccaaacaaattcctaactttactgttatagatcaggttttccctataatttgacaattttattttatactccattttattctgtcccctacccacctttttttttctttctgcatgcatttagatgcttaatagtatggttacaacaacacagctcatcgaaagggaaaaagcttatgattttgtaagttatggcacactttgaggctgtaatttcatgttacagattgctaatattgatttttttccctcttttgttaaaaaaaaaaaaaagattgcaccattgttgaagataccgtttttggatgaaggtcccggtaactctttcccccgtaaggtatgtggaatgtttattcagttacaattcaaatgaatgaactcataactgtttgtttgtatgatctgattttgttgtttgttgtgttactgtaattttgttgtaataatgtttggacctgtccagactttctttggatctgtttaagcatgggactaatattcccctttcaaaccatcgcatttctagtagtgtgaaatctgtggcaattatgttgtacttgatttgataaagattttgagctgaagataagtgatgagctgcagaagacagacatgcagacagacaaatatattattcattaaagatattgtaatttgattaacccttttgggaataatcacatttctatgaaggtcactgctatttttgtccttaatataaataaacaatgcttaactgagcttttattacttatatgatttgaagacatattcaattcatgtccttatgatctcatgaagtttgtcacttcactcatgtatcacctagacaattcttatttccatggttgttttcttctaataaaagtcattttaaatgaaaatagagtaaaatctagcatgtaaagctggtttaaataaaaatagagcaaaatctagcatgtaaagctggagagctactgaagacaaaagaagcaaaataacaggttatccattgagagagtatgatagataagttttgggaatgattctagtagctagttattcattgattctatgaacatgttaacaaggatgaattctatgatttctgaaaagtgaaaagtcgatttcctactctcaggatcaggcaaaactaatctatttggaaaattctatcaaatatttatgaagttgttattggttttttctaggattactatttgacaatacaacttaagcccaagtaactttttttcttaattaatagtattaattaattaatactatgactttcaatgtacctgatgtgcagatgggacgtgttgatggacacaatcctcatatcaggaaggatttgccgttgacctggactaatgtctatgaggaggccactaattcatctgtatcattaggtaagaagaaattggtctctttgcattttcctagcactttcctggtttcctttatggctttggtatgtttatgtcaattagcttagcatttgattcatctatgtccattttaccaagtatctaatatgagctggaaagtatctttaatgagtattatttgaacaacgtaatgttagagctgatgcattaccctatcttgttataaagtattacaattattatatgaaaagtcactttaagataatttttattgtttttatttttttagtgacattaaattgaaacatgttattctcttttatcttctttttgtcccatcgttgtttggtccttgtgtttgctttgttgcttttttttttggaactgaggtcttcatttagaagtgagaagttggaatgttcaaattaaaacgattatgtcacatgagcaatgaagtgttgatggtagcatgaataatttcataagcgagttggtataacagtaacactgatgaacacattaatcctgtatgttccatgcattagtggttattgagaggttggcttcctctcttttacatttttattcaatgaaggggactgcttctgattctgttgagtgtaagcaaggaatttattgtgatggtgtagttgtttatttggattgggaccatggtgtaacaaaagatattggcatcattttaacgataagttgctttctgagtgttcctaaaaagagccattatgtgtttttttcctggtcaaaactcactgagtcaatgttgggtgcttcagttgtactgtagatctgtattaactgtgccccatttagatgtaagaaatgcatttattaaatgatttagagctgcataattttatggatctggaacctcatttgttctccatattttttcttactagttttatgtcttggtcaatggacttgttcctttatttgttattttcaatcacagtgtgaagggagaggtgcaagcctgctattaatttcaatatttgagcatttctttttgctttgtttccattaaatgtcatcaggaatttaagaatttaggacaggtataaaattttcacctgaaattatgtatctaagcacctcagatttcaacattctaagatgcatcataactttactataactgtcttggagttggaatgtggttagacaagttgctgaaaacctgcatgaactcaaattttaaattgatggtcagatttatttttttaagaatttgatgttcacttgttttgttttgctgtctccataagttcaggctcttgaggggctatctatgtgtacttcaaatacataggcggctacactccctgtatctttctcaagttattgttgcccagaaacaaagaaactaaagaaatgtctgtattgcaactagttctattgatcatctggctttttctgattgtgaaaaagaatatattctacataaatatgaatggggtgtgctgtctctctaatctgagttcaatctatttgttgtgtgaactaacagagcatgtttagctttttggttctttgtgatccattataagcattgtagatgtacataagaggacatggcatttaattttgctttggtcttaaatgctgtgttattttcatattaattagcattatgttatgatttgtatacaaattggcacttgtagagacttcaagtaaagatgagactggtcagtttttggatccaaaagaaggtacacattcaaaggaacctaatgcaagtgaaagaaaattcaaagagttcatttgtggtgaggaagcattaagaatatccccaactgaaccatattgtttttgccatccaattcgcagaggacatttgaacatttcacaatattattccatgcagcaggtacttatcacttccaaactagaatactattggtgtaagtcagtaattttatctaggtgctgtaaagctttttcctccatcacagcatcacctatgggcttctttgttgttgcctgttgcatttttaggttagttccgcatttaaaaaaaaatatacaataagttttcttcataatggagaataatgcagaagtgggggatgatatgtttaattattaattaataaattgtagtaattcctagtgggataaggagttgttgttgtaataaattgtagtaattatgatgtaactgaattgggagttaacacttgtattggtgatttagagatttatcgtcaataatttgggaaattatggtttagttgttttggtcattgaatatctaacctcttttggaatatatttttattttgttttctagattgggataacttgagtctgaagttcgggttgcttgtccaaataatttagggtcctttgagttgcttatataaactattagaaatgggtctaataactcaaccctaaaagctagttcaaaggaagaggattgcccaagccttacaaagtattatggccatattcctagctgatgtgaaacatcttccccctcatgcccaagattgaatagttggaatatgaagtttgcaagactagacatctatgggtggccaaacatcaaagactggacagactttgatactatattagaaacagattagatttaactttactacaaaagctagctcaagggaaagtgttgcccaacacttgtaagaagtttggccatatttctagctaatgtaggatatctaaatgtgaaccatgtcttagagattaagatacttactgtgattgaatggtgagaatgttgagtgtcttcgacattatttctagctctcattttatatcactaccacttgcctattttgcaggtacttgaagatctacatactatttgggactggattttaatagagaaactgcacattcctcacaatgaaagaaatatgtattctgctgttcttgtgatgccagaaacatttgacaatcgtggtatttggaaattagttcatttaaactgtgataaatacttgtcattaatttattttgcatgttgtggttcttttcaaattcttatttttccactcttgacatagtcattttatgtttttgtccttgccacgagcagaaataaaagaaattctatctttagtactacaagaactccgctttggctcagcagtggtacaccaggtatgacctatcttgctgttataagtttatatgatatgatgaatgctggtataaatgactattaatctgagatgatgaacatcatcattgactgatcgtggttatagttgttttgttgctgctgttgataatattttaatttacttctggggttatttcaaactcccttgactactatagatggacactggtatcatcggcaagcctcattctcaaggagtgggttcagtccctcaagattggtatcaagcatgttggtaatgaaaattgagggaactgaacaaatgtgtgttaagcaaagctgttcttgcccttaatttgggtgatttgactgtcatacttttggttaatattttccaaatgaaaccgagtcttactgttggaagttgttgcagcagactttattcaaattttcctagtctcaaactttttgctcttgctttacaaatcctttgagctctaacagttgcgatatctttaatctacatcagggatcacgatcctgatggatgatgaaatataattatagaatggggtgttggagatcaaatactaaaacatttgatcaaataggctttttatacatagaagggaactatttgtcaggatttctcaattagcttctaaagatttcatatggtattatttgaccaggaaggtcttgcagcagtttttggaaatggattatcaacagcatgtgttgtgaatattggtgcccaggtgacatcacttatatgcattgaggtaaatgaaacttcggtgtattttattattattattattattattcaacatatcttatttggcactacatttggagttttctattaggatatcttggaagatggaataactcaatgatgtaacattttcctgaacatgaatctagaatttgtctttatggattaatagttctatgatctactactcttaacagcagaaaatttggaagtagattaatgacagcgctgtatgtagatcaacacatcactgtatgtttatccagcacccaggggtggagccaggaatttggtttgaggggggccaaagaaaaaataaacttttacatgtataaaaaatatataaaaagtttaatatatgatatatatatatatcatatatatatatatatatctaatattttttataaagaaaaaatataactatatcaagtacaaaaaacattactacctagctaattagatcatttatataaatataacaaacaaatagatacattttttcttgtaattataaaaaacatacttggttttaaatatattaattatacacttgtatataagaaacaaatagatacattttttatatccttaaattattgtgaattttattaatgagacaatcaatcatttcatatacaagtggatgtattcatttgatttattaacaatttaagtcaatttcataggcaaaaaaaaaattatttagtaatgttattaaatataaccactactttaactattggattatatgggtatttttagaataaaattcaaatttgatatttttaattaaaattaactaacttaactatttctattggttttatttcttttatatattaatagaggtagtataagagaaaaaagataaattagatgtataaaataattttgaataattatatgtggactctgtaacattacaaatatttcattaatgcctataatttctctttatcttactctttctctcgcattatattacctattgtagttacacctttctcatttttctctaattttctccccaagtgtctactaacatggtaattttcatatatcatttttcaatattttaaaaaaaaaattaggagggcataattttttctataatatattaaatacactttgaaaaaatttgggggggaggggtgggcatgtgcccccctccctccgcctctgccagcactgcctgacagtgtggtagtagattaattacagcagaaaatgtatatatgctccctgaactttacttcattcgttttgaagtaaccaccctcaactttcagatttggcagtgtggaaaactttgttgtaccatcagcagtaaggaaaataacatttacttttctgatattttcaatttttgaaagtggtccttaaattttctaaaatcctacaaatgacactcttgggtgacaagttgatagcatgtttgataatacgccaattcaaaccatacacgtttaatttttacgtccacagagaagctactctgtttagcttttatttttcattttttcagtaaaaaacgctaatcagagtctcttagacgcagaaccaaacatatactaagttaaaaccaatcgcttggttgctttcatgtgttgattaatatgacaataacccttccttttctcagggtagtgttttgccccacttgtctgggctttccttctcctgaaaagtagaagctcctccaagtagctttcatagaagctttatttttgggattttgttcattaaaaaaaagctactttatttttaagagcttttgtaaaatcgtgcttagcccaacttcttttaaggaaagagaagcgcagaaaatgttaggccaaacactacgtaggtggggttggctatggatcaaataacgctgcatgctgctatcttggattaataactatggttagagatataacaacaaaaacaatttttttcccactatgtgaggttgtctataaatcttatgttggccatggtaatcgtaacaactaaatattgttgattgtgacgtttgttttaatgatttaaacttctgaccagtcattgtattttctttgtgacttcagtaaaacaaatatggtaaaataatttctatgactttgacactagtaatattattctgaatatagttttgctattggccacatatatcaactttaagtattagcttgtgcctatttattaactgttgaagttgagttctctgcatagatgatggtagttcagattgatatgaaaaacacaaggtcactaatcttggcatttaaatttgtctcttgttgctcaggatggaggtgctctaccttcaaccggaaagactttgccttttggtggtgaggtacaaaatagtttcatatttctacccatttttactgatgttttaaatccttaaaaacttggaaaatatgcacttactgacatgcttgatatacctaatatttgattttctgactcaaatttttctttaagtgtagcaactatgtgattttctttccacctgtgaccgtgacttttgccatgtataaactaaactatattggtccgaacaaatggattaattgtgtagtatattggtccgaacaaaagtattttcttagaatttgaacttagggcacaactcaatctcacaaaaccagcttgtaaagtgaggactgtgcaaacttttttagctctattttagtcatataagtcgctgggactaaacaccacccttgaggtgacaattaaggaaacccctaaagaggccacaactaagataggctaggggtgaccacaattaaggaggctttccaatagtatttattctatgaagtattgatccaaacaaaagtcttcagctagcctaggcattccaaaaaagacctaaatggtgggggaataaattgaactatgattatgagttatacattggatgaaagatgtacacgtataagaacttgagttacaacaaatatgtattacaaccacttttaaagctttctataaacgaaagagagaaaaacttctaaacagaaaatgaggaagatgataatattcaacccatccaaaaaacgattacaactctagtatatatgctagagctaggacagctgtacacagctgttattacaactgtcaactaacccaaggttagttgagttaactgtaaaggctaattatactaaactgaaataaaagaaaggagtaattccactctactactcttatacacttacctaacattgacttgtataatccaattgttaaaaatattcagcaacacaccctctaaatcccgtgcctcgtgtaattaaagaaaactgtgcttgtcaatgtatacggattctccattatgtaatatgttgctattttggctttttcaatttgctttagtatcaagattttcatattataattcttctaattatgtagctgaccatattttgtgtgttccaaattttgtaagtttgtggtattatatgatgtcattatttaaataaggacttcatactttcaggatatatcaagggcttttctctggacccaaagacactaccagacttggtcaccagttcattcagatgtttttgcaaaacctatagatctgctaatgttaaatcaactgaaagagacatattgtgaagtcaaggtgagttctactactttatctcattttgttgaaacaatacattattttccttgcatcctgttactgagtttgcagacatctccctgagtaatttagagctcaagcttattgagtgcaagctggattatttaatttgtaaattagttgccgcacatttgtgcccctgtaaatatgtttatcttgtttctaaatatcatgaataattttttttatatagtactatttacaaatttcattcctttccacttgtcattgggaacaagtaatcttacagtttcaaggtattttttgtgtacaaagtaaattcagattccaaacaactgtttaaatctatttgaattgattttgtcctatggcctacaaaaaagtaagtagcagtgactaaacctatttcaaacattcttaacaccttttatttttttatttgtttctgttgtagagtctaataattatttaaagaattcatataacacatagcttgagtttgaagcaaaagggagaaagtagcattttaaaaaaagttggtttctcttctctctctctttggtccatctcttttaggctaaaagaatgaaaactgtcaaacaactcttattttatttttaaatctcttattttgagttctgatgtaaaagtagcttctaagtaacaaaaaaatgctggacaaaatacctcctagcatgcaatactctttgatgtaagtacaagtgcacaattcttctcaattatattttatgtggagggtctacttagtctgtacactttgggtttgtggtcattttaaaatattacttggtaaattttcaaaatttttgaaaaattacacaataaaatttgaagaaaagctaacttaataatatttaaattgatataaatattaaaaattgtaacataaaatctgcttcaaattatctgtttttctatattctttttgtctctttttaaggtttattttctccaaatgagtttgcccaccctttaatgtttttatattctttataactgccctttaatgtacaaataagccaaaacattggacgtgtctcatgactttcgaatatgcatctcatcatatacaactagtgctgctgctcctctcaagtttttgcttgcttccaaacttggattcattttttaatcatctagtgtcctgtctataggagggggaacttgatgctgttgcagtagttcattcctatgcggaaaaagtgccagctgtgtctcacaagacaaggctttctgctcttaatgtatgttcctccattgaatgtttttcattttccctcacatttttcctttgaacaatggtatgattgcaaagggatgatgattattgcacaggttcctcctatgggattgttctatccaacacttttaactcctgatgtgtatcctcctccgccccgtacttggttagtggattcatgaatttctttctgtgctgttagcatgtttgtgaacaaattatatgtttacacaattctagtggtttcccttgctaggtttcacgactatgaggatatgcttgaagatacatggcatattgacttttcgcggaggtctgacatgccagatactttctatcccaatgttaatggaggattaccaatgtgggaaagctatccagttttttcaactaagccaaaaaaagaagagaaagttggccttgcagaggctattactaactgcattctctcaactggtaattttgtcctttttttcatttcatacacataattttgaagccttgtttaactgctgggttttgtattcacaggtcgcatagacatccagagaaaattattttgtagcatacaattggtgagttttacatgttgagcttggtatataattatatcttaatattacatgttgattggaaggaattgacacatttttctggaatagactggtggggtggctttgacaagtggcttagttgcagcagtagaagaaaggtttgtttcaattttgattcaccttatcatattaacctacctgacaacaagttaatttggctatgatactgatatttgcaatgatagttcatgtattgtttcgtattaaagaaagaaaaagtagttgatgggatcaaactacattgataagggtttaattcttactagtgcttattcatttgtagatcatcttcctgaccttgaaattggaaaacctacccccgtcccccaaacttctttgtacccaaaagaccaaaaaaaaaaaaaaaacctgaaatcaccagcatccttgttacttgttagtgtgatattgtagacatattaagcaaatcaatgaattctgtctgtaattatgttacatattggaacgaaaacataatctcatttaatgacctgaagttttgacttcaacgttaatgtaattttttttgttttctttctttattatttataattttaatgttagatttgacttcttcgtaagctatttttcttttcttcatcctgttggacattatcccatttttccttactttttctctaaaagaactgtacgtttagcagtgaccatcattttatgctttttcatttttcctcatcttgttttaattagttctatttttcatgtcgaatttcaacaccatagtgtcatgaatgattctgttaattatgtcatgatattaagctgatggatgaatccactattcttttgagtctcagagttttacatgccattcctccaaatgaagcaattgatactgtggaggttagtttcatatcctataatctaatgattactttttaatcatctgtacttaaaattataggtgtgcgtacaaatctgatccaagtggcattgctggccattagcgctccatataattgttgtaatgtagtgtgaataatcgatccataaacattgataaaagataaaaaaaaaaatggtctgaagtagtggctttgattggaaaaagaggtgaactagtcaggtgtccagttcactcaacccagcaaagaaccagtaaataattggctgaaccagtctagaactagtgaaactggtggtaaacctttttcaattttaatataaccagaatcaattttttagcaaaataaaggtccgatgccaagctacaacgaaagttcagccttaagaggggtatttgttggattattattattatttagtctcttattattagtttatctttaaaacatagaatttgatctaatttattacttaatatattatataatgttaaaaaatggtatttaaggcttattatgtttgtagtccctataatatacctgttttatgtttttagtccttataaaaaatttctatggttttggtccctataaaattttgtttttcagtccttaaatggtatttttttagttcttataaaatcgtaaacttttgatatttgcccctcttctattagaagatattcattttagtccctatgttagaatcattgggtttgttatccaatagatagttgacatgtcatgcgtgggatagtaatagggactaaagctgaaaaataaaattttatagggatcaaagccataagaaaaattttagagactcaaagcataaaacaaatatattttagaaaccagaaacatgtttaagccaatgtttgattattgtggtttggccactttcaaccaagctcaaaccattgaattgtaatagttttttttttttacacatttatgtgaaagtgatagctttaacctacttattttttgttttcttgttaactatttgtctctgattttatgtactaccttttgtacatggtggctcttaaggttctacaatcaaggacaaatccgacgtttgtgtcttggaagggcggggcggtatgttgaacacttgtgaccttcatgcttggcttcttacttcatgaatttcttcttgttggttattaaatggttcttattgtcactatatgttttttcaattatgaatgagaaatatatgttcatctctttttggatgttaatgttgattcttctttcatggacttggaggaatttgatgtcttaaattattggaaaaataatcttgttaattattcagctttcaaagtcataaaattcatgaatttaaggttgagagggaaacagagggcgagcctagcgaagccaaataaataatatgttttagtagttgtttatttatttatatatgtaaatcattgttattttttaaatacaaattatcaatcaatttcagattcaggtctacggttccagttgattttcaattgtgggatgtggacctttattacaatgtccaagttccacaattgtgggtccattattaattgtaagatgttaaatctggtgggaagtggtcagatattttgttttaaaatcttatacctgaacctgatcatgtataatgtatccttaatttttgcttaacatactgatatgcctttgcagattcttggtgttcttgatttaggcagggatgcatggataagtcgggaggactggattcacaatggggtccatgttggaagtaacaaaaaatacaaggattcatattatcttcaagctcaagctatgtgttatatgaattcttgaaaggatgatgagacactacaatgaaaacaggaagaagaaaaaaaaaatgcaaacaatattagaaggctacgtgtgataattagttaattatatggattacaattccataatccccggctaactaggccatagcaaactcaagtctcacgtcggaagcttaggcaaaagaaatggaaagtagtccttgtgaatataacttatagtctaccttgaaatttaagaaggggtcaattacccggattctcattttgccattgtttttaccttttgaaattttatattaaattaaatattattttgttta

SEQ ID NO: 57 - DNA, 12258 bp, Glycine max
  source 1..12258: mol_type = genomic DNA
tgcaaattataatttttaatttagaagaagatacttggagagtaggaactaggaactagaaccttcatcaaacaaatttgttagagaaagtgttcctcaattttgaagagcagagaaaacaacaaaggctaaaaggaagggaaaaaaaacaccaaatttgctaaacctttgtcactctactcactgcaactgcaacatcctctctttcccatggtacaatttctctcttttaccgttaccttttcgacaattttgttctcatatcatattggggatgtcctcgtgtcacaggattaccttaaatctgcgcttccttctcaaataatgtcagaacgaggctccaatctggttgttatcaacccaggtatgcaaaaaatccaattttgttcactgcccattggccaccttcttcccaaaatctacaccaagcacttaagtattctaaatttgttgataccatacccattattactcaggttctgcaaatgttaggattggcttggcttcacaggataccccttttaatattcctcattgcattgctcgccataccgaacaaattcctaactttactgttatagataaggtttttctgataacttgacaattttattttatactccattgcatgcatgtatgtgttgctttaattgttgttggtttttgtttttctgcatttagatgcttaatagtacagttacaactcaacagcacatcgatagggaaaaagcttatgatgttgtaagttatggcacactttgaagctgtaatttttatgttacagattgctaatattgattttttccctcttttgtttaaaaaaaaaaaagattgcaccgttattgaagataccatttctggacgaagaaggtcccagtaactctttcccccgtaaggtatgtggaatgtttattcagttacaattcaaatgaatgaactcataactgtttgtttgtatgatctgcttttgttgtttgttgtgttactgtaatttgtgttgtaataatgtttggacctgcctagactttctttggatctgtttaagcatgggattaatattcccctttcaaatcattgcatttcaagtagtgtgaaagctgtggaaattctgttgtgcttgatttgataaagattttgagttgaagataagtgatgaactgcagaagacaaacatgctgacagacaaatatattattcattaaagtaattgtaatttgattgacccttttgggcattctcacttttctacgaaggttacttgttattggtttttctaggattactatatggcaataaagcataagtgtaagtcactttttttcttaattaataccatgactttgaatgaacttgatgtgtagatgggacgtgttgatggacacaatcctcatattatcaggaaagatttgcccttcacctggactaatgtctatgaggaggccactaattcatctgtgtcattaggtaagaggaaattggtactactcaaatgatgttttggaatgctttcttttgctaatcatactagaagaaatccacatactttttccttttggtgcactaattttttgaaatgtttataagtggttcccaccagcttattaagctgaggatttatttttcttatttggtttttcacatatgttatgttatatgattctaacattaatcctgtatgctccttgagttagtggttattgagaggttggtatcctctttctttcaatgaaggggacaggttctgattctgttgagtatgagcaaggaatttattgtgatggtgtagctgtttatttggattaggaccatggtgtaacaagatattggcatcttttaatgataagctgctttctgagtgttcctaaaaagagccattatgcgttcttttcctggtcaaaacttaccgagtctaggttgggtgcttcagttgtactgtagatctgtattaactgtgccctatttagatgtaagaaatgcatttaattaaatgttttagagctgcacaattttatggatctggaacctcatttgttctccgtattttttcttagtagttttatgtcttggtcaatggacttgttcctttatttgttatttcaaatcacagagtgaagggagaggtgcaagcctgctattaatttcaatatttgagcatttctttatgctttgtttccattaaatgtcatcaggaatttaggaattcaggacaggtataaaattttcacctgaaattatgtatctaagcacctcagattttcaacattctaagatgcatcattaatttactatacgtctacacctgtcttggagttggaatatggttagacaagttgctgaaaacctgcatgaactcttcacaaattttaacttgatggtcagatttatttttaaaaaaaattgatgctcacttgttttgttttgctgtcttctcaagttcaggctcttgagggaaccatctatgtgtatttcaaatgcatagacggccacactccctgtatctttctcaacttattgttgcccagaaagaaactaaaaaatgtctgtattgcaactagttctatagatcatctggctttttctgattgtgaaaaagaatatgttctgcataaatatgaatggggtgtgctgactctctaatctgagttcaatctatttgttctgtgaacaaacagaacgggtttagctttttggctctttgtgatccattataaacattgtagattcacttaagaggatatggcatttaattttgctttggtcttaaatgctgtgttattttaatattaattagcactatgttatgatttgtatacaaattggcacttgtagagacttcaagtaaagatgagactgatgagtttttggatccaaaagaaggtacagattcaaaggaacctaatgcaagtgaaagaaaattcaaagagttcatttgtggtgaggaagcattaagaatatccccaactgaaccgtattgtttttgtcgtccaatccgcagaggacacttgaacatttcacaacattattccatgcagcaggtacttatcacttccaaactagaatactattggtgtaagttagtaattttatctagatgccgtatagctttttcctccatcacagcatcacctatgggcttctttgttttgcctgttgcatttttaggttagttatgcatttttaaaaaaaataaacaataagttttcttcataatggagaataatgcagaagtgctggatgatatgtttaattattaattaataaattgtagccattgtgatgtaactgaattgggagttaacatttgtattggtgatttagagatttatcgtcaataatttgggaaattatggtttagttgttttagtcattggatatctatcccctcttggaatatgtttttattttgttttctagattcggataacttgagtctaaagtttgggttgcttgtccaagtaatttagggtcctttgaattgcttatataaactattagaaatgggtctaataactcaaccctaaataaaagctagtacaaaggaagaggagtgcccaagccttacaaagtattatggccatattcctagctgatgtggaatatcttaacacatccccctcatgcccaagattgaatatttggaatgtgaagtttgccagactagacatctatgggtggcctaacatcaaagactggacagactttgatactatattagaaacaggttagatttaacttaactacaaaagctagctcaaggggaagggttgcccaacgcttataagaagttggggcatatttctagctaatgtagtatatctaaacataaaccatgtcttagaaataatgcaaaatagtgagaattttgagtgtctttgaattatttctagctctcattttatcactaccacttgcctattttgcaggtacttgacgatctacatactatttgggattggattttaatagagaaactgcacattcctcgcaatgaaagaaatatgtattctgctgttcttgtgatgccagaaacatttgacaatcgtggtatttcgaaattagttcatttaaactgtgataaatacttgccatttatttattttgcatgttgtggttcttttagaattcttatttttcctctcttgatatagtcattttatgcttttgttcttgccacaagcagaaataaaagaaattctatctttagtactacgagaactctgctttggctcagcagtggtacaccaggtatgacctatcttgctgttgtaagtttatatgatgaatgctggtataaatgactattaatctgagatgatgaacatcatcattgactcatcatggttatggttgttttgttgctgctgtcgataatattttaacattacttctggggttatttcaaactcccttgactactatagatggatactggtatcattagaaagcctcattctcgaggagtgggttcagtccctcaagattggtatcaagcatgtttgttggtaatgaaaattgagggaactgaactaatatgtgtgaagcaaagcagttcttgcccttaatttgggtgatttcacggtcatagttttggttaatattttccaaatgaaaccgagtcttactgttggaagttgttaccgcagactttattcaaattttcctattctcaaaccttttgctcttgctttacaaatcctttgagctccaacagttgctatatctttaatctacatcagggatcatgatcctgatggatgatgaaatgtaattatagaatggggtgatggaaatcaaatactaaaacatttgatcaagaaggctttttatacatagaagggaattatttgtcaggatttctcaattagcttctaaagatttcatatggtattaatttgaccaggaaggtcttgcagcagtttttggaaatggattatcaacagcatgtgttgtgaatattggtgctcaggtgacatcacttatatgcattgaggtaaatgaaactttgatgtattttattattattattcaacatatcttatttgacacttaatttggagttttctattacaatatcttggaagatggaataactgaatgatgtaacatttgcctgaacatgtatctaaaatttgtctttatggattaatagttctatgatctactactcttaacagcagaaatttggaagtagattaatgacagcgctctatgtagatcaacatatcactgtatgtttatccagcaccacctggtagtagattaatggcagcagaaaatgtatatgtgctccctgaactttacttcattttgaagtaaccaccctcaactttcagatttggtagtgtggaaaactttgttcagttattgttgtaccatcattagtaaggaaaataacatttacttattttttaaaaagtgggccttaaattttctaaaatcctacgaatgacactcttggtgataaattgatagcatgtttggtaatacgtcgattcaactcataggcatgtttagtctttatgtccacagacaagctactctgtttagtttttattttcatttttcagtaaaaaatgctagccagagtctcttagacgcagaaccaaacatatacttagttaaaaccaatcactaggttgctttcatgtgttgattaccttttctcactagggtagtgttttgccccatttttctgggctttcattctcctgaaaagtagaagctcctccaagtagcttttatagaagctctatttttgggattttgttcattaaaaaaagctactttatctttaagagcttttgtaaaattgtgcttagcccaacttcttttaaggaaaagattagcccagaaaatgttaggccaaacgctgcataggtggggttggctatggatcaaataaggctgcatgctgctatcttggattaataactatggttagagatataaaacaacaaaaataacaattttttcccactatgtgaggttgctataaatcttatgttggccatggtaatcataaattgttgattgtgatgtctgttttaatgatttaaacttttgaccagtcattggaattactttgccacttcagtaaaacaaatatggtaaaatagcttctactatgactttgccactagtaatattattctgaatatagttttgctatcgaccacatatatcaactttaagtattagcttgtgtctatttattaactgttcaattgagttctctccatacatgatggtagttcagattgatgtaaaaacagcaggtgactaattttggcatttaaattctgatcttgttgctcaggatggaggtgctctaccttcaactggaaagactttgccttttggtggtgaggtacaaaatagtttcatacttctacccattactgatgttttaaatcattcaaaacttggaaaatttgcactaactgacatgcttgatatacctgttttttgtttttctgactcaagttttttctttactcaagtttagcaactatgtcattttcttttcacatatgtgactgtgacttgtgacatgtataaactaaactatattgatccaaacaaatggattaactgtgtagtatattggtcagaacaaaagtattttcttagaatttggtcttagagcacaactcaacctcacaaaaccggcttgtaaagtgaggactgcaaactttttaagctctatttaagtcatataagtcagtgtgggactaaacaccacccatgaggtgacaattaaggtaacccctaaagaggccacaactaaggtaggctagggttgaccgcaattaactaagctttccaacagtatttattccatgaagtattggttcaaacaaaagtcttcagcttgcctaggcattccaaaagacctaaatggtgggggaacaaattgaacaatgattaagagttatacattggatgaaagatttacaggtgtaagaacttgatttacaacaaatctgtattcccagtcaaagaaccacttacctaacattgacttgtataattccaattgttaaaaatattcagtagcacaccctctaaatcccgtgccccatgtaattaaagaaaattgtgcttatcaatgtgtactgattctccattatgtaatatgttgccattttggcattttcaatttgtttctttgtatcaagattttcatattatagttcttcgaattatgtagctgaccatattttctgtgttccaaattttgtggtactatttgatgtcattatttaaataacgacttcatactttcaggatatatcaagggcctttctctggacccaaagacagcgccaaacttggccaccaattcactcagatgttttcggaaagcctatagatctgttagtgttaaatcaactgaaagagacatactgtgaagtcaaggtgagttctactactttatctcattttgttgaaacactactttattttgcttgcatcctgttactgagtttgcagacatctccctgagtaatttagaactcaaacttattgagtgcaaactggattttttaatttgtaaattagttgcagcacatttgtgcccctgtagatatgtttatcttgtttctaaatatcatgaacaaggaaattttttaaagtactatttacaaatttcattcctttccactcatcattgggaacaaataatcttacagtttgaaggtgattttttgtatacaaatatctaaattcagattccaaacaactgtttaaatccatttgaatagattttgtcctattgcctacaaaaaacgttagtaacagtgactagtgagcctatttcagtcattcttaacacttttttttttatttgtttttgttgtagagtataatcattatttcaagaattcatataacacatagcttcagcttgaagaaaaaggaaaaaaggttttaaaaaatgttgggtgaaaaaggtttcccaaaaaagttggtttctcttctctctctcttcagtccatctcttttaagctaaaagaatgaaaactgtcaaggattatgtaagagtcaagattcggggttcattaattgaatatttgactttcttagagtctttttctaactcttattttattttttaaatctcttctaagtaaccaaaaaaaagctggaccaaatacctcctagcatgcaatactctttgatgtaagtaccagtgcacaatacttatcaattatattttatgtggagggtctacatagtctgtacactttgggtttgtggtgactttaaaatattacttggtaaattttcaaaataaaaatttcaaaagttttgaaaaattacacaataaaatttgaagaaaagctaacttataatgtttaaaatgatgtaaatattaaaaattgtaacataatttctgcttcaatttatttgttttttatttttttgtctctttaagttttattttttccaaatgagtttgcctgccctttaatgtttttatattctttataaccaccctttaatgtacaaataagccaaaacattggacgtgtctcatgagtcatgactttcaatatgcatctcatcatataaagctagtgctgctgctcctcttaagatttcgcttgcttccaaacttggattcattttttaattatctagtgtcctgtgtataggagggggaatttgatgctgttgcagtagttcattcatatgagaacaaagtgccagctggacctcacaagacaaggcttagtgctcttaatgtatgtatcctctgttgaattttcttcatttgccctcacatttttcctttgaacaatgctatatgactggaaagtgatgatgattattccacaggttcctcctatgggattgttctgtccaatgcttttaactcctgatgcgtatcctcctcctcctcgtacttggttagtggattcatgaattactttctgtgctgtaagcatgtttttgaacaattatatgtttacacaattctagtggtttccccttctaggtttcatgactacgaggatatgcttgaagatacatggcatattgacttttcccggagggctgacatgtcagatactttctatcccaatgttaatggaggattaccaatgtgggaaagctatccagttttttcaactaagccaaaaaaagaagagaaagtcggccttgcagaggctattactaactgcattctctcaactggtaattatgtcctttttttttcattctatacgcataaatttgaagccttgtttaactgcttggttctgtattcacaggtcgcatagacatccagagaaaattattttgtagcatacaattggtgagttttacatgttgagcttggtgtataattatcttaatattacatgttgatcggaaggaattgactcatttttctggaatagactggcggggtggctttgacaagtggcttaattgcagcagtagaagaaaggtttgtttcaattttgattcaccttatcatatatttgcaatgataattcatgtattgtttcatattaaagaaaagaaaaattagttgatgggatcaaactacattgataagaagatcttgggtttaattcttagtagtgcttattcatttgtaggtcatctgttggccctgaccttaaaatcctcaccccccccccccccccccccactttgtacccaaaagaccaaaaaagaaactgaaatcaccagcatccttgttacttgttagtgtggcattgtagatgtattaagtagatcaataaattctgtccataattatgttacatattggcatgtaaacataatctcatttaatgacctgaagttttgacttcaacattaatgtaaattttcttgttttctttctttattatttataactttaatgttagatttgtcttcttcgtaatctattttttctttccttcatcctgtctgacattatcccatttttccttactttttctctaaaagaactgtacagttagcagtgcccatcatttatgcttttttgtttttcctcatcctgttttaatttgttctatttttcatgttgaatttcaacaccatagtgtaatgaatgattctgttaattatgtcatgatattaaactgatggatgaatccactattcttttgtgtctcagagttttacatgccattcctccaaatgaagcaattgatacagtggaggttagtttcatatcctacaatctaatgattattttttaaccatttgtacttaaaaattatagatgtgtgcaaatctgctcccagtggcattgccggccattagcgcaccatataattgttgtaatgtggtgtgaataaattcatccacaaacattgataaaagataaaaaaaaaaaaatggactgaactagtggctttgatcggaaaaagaagtgaactagtcaggtgtccagttcattcaacccagcaaagaaccagtaaaaaattggccaaaccagtctaaaactagtgaaattggtggtaaaccttttttatttttaatttaacaaatatattttttagagactaaaagcataaaacaaatttattttaggaactagaagcatgtttaagccagtatttaattattgtggtttggccactattcaaccaaggtcaaaccattgaattgtaagtttttttttgcacatttttacgtgaaagtaatagcttttaacctactttttttttttgttttcttgttaattacttttgactctgattttatgtactaccttttgtgcatggctcttaaggttctacaatcaagggcaaatccgacgtttgtgtcttggaagggtggggcggtatgttgaatacttgtgactatcatgcttgacttcttcatgaatttcttcttgttggttattaaatggttcttattgtcactatatgttttcaattctgattgagaaatatatgttcatcgcattctggatgttaatgttgattcttctttcatgaacttggtggaaaatatgatgtcttaaattattgggaaaataatattgttaattattcagctttcaaagtcttaaaattcatgaatttaaggttgagagggaaacagagggcgagtttagccaaagcccaacaaataacatgttttagtagttgtttattgttttataatgtaaatcatcattattttttaaataaaaattatcaatcaatttcagattcaggtctactgttccagttgattttcatttgtgggatttggacctttaatattgaaaattttggtgcacaagttccacaattgtgggtccactgagatgttactttagatcattgtcaatttgttgattgcaaaagcagattgctgtgcatcaaggtagtacttgggttgggatgggatggcggtagcattgttgtgcaaagtcagatattaattaagatgttaaatgtgagggttggtagttagtggtcagatattttgttttaaaattttagacctccctgtttggaacttgatcatatataatgtcattgtctaatatatcattagtttttgctgtcttaacatggctgatatgcctttgcagattcttggtgtccttgatttaggcagggatgcatggataagtcgggaggactggattcacaatggggtccacgttggaagtaacagaaaatacaaggattcatattatcttcaggctcaagctatgtgttatatgaattcttgaaaggctgatgagacactacaatggaatcaggggaaaaaaagatgtaaagaatgtttgaaggctatttgagtgctaattacatggattacaattccataatttccagctattttttttaggccataggacatagtcaattcaaatgggtttaaaccattgtttgggatcttaatttctatctatgtatgtcagatcatcttgaaactgagattatttgttcctgacaacgagaataatgagatctgtaaatagtattttatgttaagtttcaagctttttgcctttcaaaagtgaaggcaaaatattatgatgctaaacgcccatcctgcatgcagttgaaactgtatcagaatcccacatcgggaaggtcaggcaaaagaaatagaaagtagtccttataaataaagctggatactcatccttaacatttaaaaagggtcagttggctaattatgccacgttcaccctcgattggtgaatgctgtatggctatcaagacatatggctgacacaatttatggaaaccaaaagggttggctcgcatagccgaccctaca

SEQ ID NO: 58 - DNA, 2584 bp, Hordeum vulgare
  source 1..2584: mol_type = genomic DNA
gctcaccctcgccccctcctcctcctcatcctccaccaccaccgtcgtcgcacgaccggaccgccggcgccgctgccccgccctccccaccccggtaacgaccatctcatgccccccctcctcctcctccccgccccgatcgatcattctctccccagatgagatccgccccgcattgcgcgcccccttgcgctcaccatcaggcccgatcgatccgatctcgcggcgggccccggcgccggctccccctcttcccgccgcggatccgaccggatctcgcggaatgggagcgagcgagcgcccgccgcgtttttttttattttcgtgccgccgcgggaatgtagatctgccgcccgcgatctgggccgtttcgggtgccggagcgctccgatccgcgccgcggtgccagagaaccatgctctctctgttcccttattaactgttcttgtcgctaagcctcgcggttaacatgccagccattgcggttaggggttcctcgtgaactgattgatagtactactcatcatgtttcttcgaaggagaaaaataataatctctgcatttatttagccagcgtccttcactgctaggatgcgtagattctcctttgatcgaccgatcgatgtgtaataataaccgtggcttcctgcgagcttctgctgtaggtagaaaatggctgacgccgaggacatccagcccctcgtctgcgacaatggtaccggtatggtcaaggtgagccgctgcatcccacgagcgttcttgcatctttggttcagggaaatgccgcagtgctctttgtgacataacacttgtggtggtgatgatgcttgcaggctgggttcgctggagatgatgctcccagggctgtcttccccagtatcgtgggccgcccacgccacaccggtgtcatggtcgggatggggcagaaggacgcctacgtcggtgacgaggcgcagtccaagaggggtatcttgactctcaagtaccccattgagcacggtatcgtcagcaactgggacgatatggagaagatctggcatcacaccttctacaacgagctccgtgtcgccccagaggagcaccccgtccttctcactgaggcgccgctcaaccccaaggccaatcgtgagaagatgacccagatcatgttcgagaccttcaacactcctgctatgtatgtcgccatccaggccgtcctctcgctgtatgccagtggtcgtaccacaggtgagctcatctatattcagctcttcttttgaattaggaatcctggaatttagcatgttcacatgtagacgagattaatctgtaaaatctgtcaatttgttttgtgtagcactagttttgttctatgacatgtggtaaatatttttcaaccaaacctgataggcagttaattgtcatcctctcccacactgtcaattcaacacattttttaattttatcaataactcgatgtacctcattgaactcctcaggtattgtgctggactcgggagatggtgtcagccacactgtccccatctacgaaggatacgctcttccccacgctatcctccgtcttgacctggctgggcgtgatctcaccgattacctcatgaagatcctcactgagcgtggttactcattcaccaccactgctgagcgggaaattgtgagggatgtgaaggagaagctgtcctacattgcactggactacgaccaggaaatggagacttccaagaccagctcttctgtggagaagagctacgagcttcctgatgggcaggttatcaccattggttccgagcgtttccgttgccctgaggtcctcttccagccatccttcatcgggatggaagctgcaggtatccatgagaccacctacaactccatcatgaagtgtgacgtggatattaggaaggatctgtacggcaacattgttcttagtggtggtaccactatgttcactggaatcgctgataggatgagcaaggagatcactgccttggctcctagcagcatgaagattaaggttgttgctcctcctgaaaggaagtacagtgtctggatcggaggatccatcttggcatctctcagcaccttccagcaggtaaataaacattacagcatcgtgcttcattcatttcattcatggatatttcgtttctttgcttacagtgttgcttggttgttgttgcagatgtggattgcaaaggctgagtacgacgagtctggcccatccatcgtgcacaggaaatgcttctaattcttcggacccaagaatgaaagccaggaggagcctttatcgcgaccctcctgccgcttcgcctccctcttttgttgctgtttcttcgttagcgtggacaaagttttcggctggcctaccggttaccgttttctcctattcaaagactgtaatatctattgctacttgtgcttgtccctcgtgattttggacacatgagttcggtttattcaatcaaatttaatcagatgcctggtgaggctactagagaaatacggctggtgtttttgatttcatttgtcatgtgtcatcactaccctgttaaatgaatgaataatatgaattgtcttgatccta

SEQ ID NO: 59 - DNA, 1790 bp, Hordeum vulgare
  source 1..1790: mol_type = genomic DNA
acagaatcgaaggcttcctccatcaattgttagatccatcttcgcaacaagacaaacaacgtacaagagaggaggaggaggaggaggaggaggaggagtcgggccgtccggagaaagaagaaaggaaggaagaagaagatggccgacggcgaggacatccagccgctggtgtgcgacaacggaaccggtatggtgaaggcggggttcgccggcgacgacgcgccgcgggcggtgttcccgagcatcgtggggcggccgcggcacacgggcgtgatggtgggcatggggcagaaggacgcgtacgtgggcgacgaggcgcagtccaagcgtggcatcctcaccctcaagtaccccatcgagcacggcatcgtctccaactgggacgacatggagaagatctggcatcacaccttctacaacgagctccgcgtcgcccccgaggagcaccccgtccttctcaccgaggctccactcaaccccaaggccaaccgtgagaagatgacccagatcatgtttgagaccttcaacacccccgccatgtacgtcgccatccaggccgtcctctccctctacgcctccggacgaaccaccggtacatacatcatcttcttcccccttcttcttcttcttgttgattgattccatgcatgcaatgacgatgacgattccaatattaggtatcgtgctggactctggtgatggtgtgagccacacggtgcccatctacgaggggtacgcgctgccgcacgccatcctccgactggacctcgccggacgcgacctcaccgaccacctcatgaagatcctgacggagcgcggctactccttcaccacgacggcggagcgggaaatcgtgcgggacatgaaggagaagctctcctacatcgccctcgactacgaccaggagatggagacctccaagaccagctcctccgtggagaagagctacgagctgcccgacggccaggtcatcaccatcggcgccgagcgcttccgctgccccgaggtgctcttccagccatccttcatcgggatggaagccgccgggatccacgagaccacctacaactccatcatgaagtgcgacgtggacatcaggaaggacctctacggcaacatcgtcctctccggaggaacaaccatgttcaccggcatcgccgacaggatgagcaaggagatcaccgccctcgcgcccagcagcatgaagatcaaggtcgtcgccccgcccgagaggaagtacagtgtctggatcggaggatccatccttgcctccctcagcaccttccagcagatgtggatcgccaaggccgagtacgacgaatccggaccatccatcgtccaccggaaatgcttctagaacccttcatccatcgtccatctccccctcccctcccctgcatcatcatcgtcatcgtcatcgtcgtcgtcatcaccaccaccaccaacaccatcatcatcaccaaacaatacaaaacaaaagtaaaggcgcgccgatcatgggaacatcactactgtggtactgccggggcgcccgctcgatcgaccacgtctcatcgtcgtcgatgatcctctttttgtttccctttgttttttttctttcttgacaatctttttacataaatcatcttctttcctttttgttttcttacttccattgtaattaattggagatgctatccatgcattcaattccattgtcatttgttttgtggatgacgtgcacttaagcggtatgcttgaattcaatctaatctaaaggccggctagcggccgagatgattactattgat

SEQ ID NO: 60 - DNA, 3597 bp, Hordeum vulgare
  source 1..3597: mol_type = genomic DNA
aacgccaacgcacgcagcgcaggacgacaccactttccacgcctccgtctccgccccagtctctctccgcttcctcctctggtcgccgccgcctcgctccccaaggttcgatcccttccccgccctccctccccctcgtcacgcttccccggacccctcgctcgctgctccgcggtggcgcggatctggccgttgatcccctcgggcgcccgatcggcggtgggttcgagctcgtgccgcactgccgaggcttcgcctgccggtggatctgcccgtgcgcgcgggctcggccgatccggcgaccctccggtccggtccgcggttagtgattctgatttggtcggccgctgcgaaatggctgtaacttcttcagttgctggtccagctagtggctattccgctggtgcattgggtgttacgcttgacgcggtgtggtgcgagcacagagtgtccaagtggtgtagcttttcccttggcccgatgggatctgctaggctacgtaacgtgagtactgtctaaatcggggaggtggcttgcttgatccaaggggaaaccaagtgtccttaccggagttcggtcataaaaatgggtttggcgtcaactttcttctgtgtcagatgagatggctgggccaggatctgtccaaatctaagataaatatcacccgaatactcttaataaaccaaataactaagggaactgattccagatggggcggcatctctgggaaaattattaagaaacatggagactaaatgctactcgtaattttaagattgctatgcatgatgctcgattgtctgtaatcccgtctcatggttttacaatggttaatgtacgcacgaattttttgtccatcaaacttctgaactaaccagtatttttaatgtcttatcaaatgtacagactaaattctaccctgtccgatccatattaattgtcgcagctttagtacaactttagtacaaagctacaacaattagatccgagggttagtaatttttaagattgctatgtatgatgtttgattgtttatactctgatcttgtggtcttacatggttcatgtattacggagaaacacaccaatatttagcttaatcggcatacctgtcaactatttgttaatcacatcatatcataatggcgttaatagctcaacatagcacaaaaaacaatttgaattccaccactgttggctgtcacatgggctttgcagctctgtaactcatgtttgatgactaaatattgatctataagtactggtactaggctggatgactaaaaatgtcgatttataactagtactaggctggatgtccagcaacagcaataattgtgatccagtacagctatagtttttttcaactttggtaggcatggttgcacatgggtagagcatgcctccctgcaaggacaacttattgctctctttctttattttaaagcataagcgtaatggtccattaatgcgattaaattgttctgtgctttcttgtttgcagttttgattagttttgccagcctactttttttcagtaacctcattagggatgaaaatacctgctatgcttatagagccttaaaggctaaagctagaggtaacctctgctaaatacagctgtagtttctccttactgtgttattaccagaaacattactctagttacatatctggaaaaggttgatgagcacattgggtagagataaattgacagcttcttaaaatgagtacttcttagtagcaagatacctagcagttaatatgtgatgtaacaagtaaatgattgagaaggtttccaattgtcttatgcagaccaatggctgacggcgaggacatccagccacttgtgtgtgacaatggaactggaatggtcaaggttcgatgctcacccctttgtttcattcaaattttaagcacaaaaaattagttctgaaaataaacacctcttcctgtaggctggttttgctggtgatgatgccccaagagcagttttccctagtatagttggccgccctcggcacacaggtgtcatggttggaatgggccaaaaagatgcctatgtgggtgatgaagcgcagtcaaaaaggggtatcctgaccttgaaataccctattgagcatggcattgtgagcaactgggatgacatggagaaaatctggcatcacaccttctacaatgagcttcgtgttgcccctgaagaacatccagttttgctgacagaagctcctctgaatccaaaggcaaacagagagaagatgacccaaatcatgttcgagacattcaatgcacccgcaatgtatgtggctattcaagctgttctttctctctatgccagtggtcgtactacaggtacttgtctgttttctccctactcaagataagtttatgcatacttaattatatcccttcatcggttgtatgacccagattgtgcgatgtctgtgcaggtattgtgcttgattctggtgacggtgtgagccatactgttcctatctacgagggatatgcacttcctcatgctattctccggctggatctcgcgggtcgtgatctgaccgactccctaatgaagatcctcacggaaaggggctattccttcactacaaccgcagagcgggaaatcgtaagagatataaaggagaagcttgcctatgtcgccctcgactacgagcaggagctggagaccgccaagagcagctcgtccgtcgagaagagctacgaactgcctgacgggcaggtcatcacgatcggtgccgagaggttcaggtgcccggaggtgctgttccagccctcgctgatcggaatggaggctcctgggatccacgagaccacctacaactccatcatgaagtgcgatgtggatatcaggaaggacctctacggcaacattgtgctcagtggagggacgaccatgttccccggcattgcagacaggatgagcaaggagatcaccgccctcgcgccgagcagcatgaagatcaaggtcgtggcgcctcccgagaggaaatacagtgtctggatcggtggctccatccttgcctccctcagcacattccagcaggtacgtacttatgcgacctttttgttttgtcatggtgtgtaccaccatcatattctgttttttttccttatctgttttaacatcttattacatgaaccaaccagacagcaaagtattacttgtgccctgatccttttcccttttgcagatgtggatatccaagggagagtatgatgagtctggcccctcgatcgtccaccgcaagtgcttctaagccttgggccgtgtctctgtgcacttttcctatgattgagcttgtatccgactcccctccattgaagtattccccgagctttgtgcggccgttttcacggatgaaggaaaagtaggtcctgtatcacttaatacagaagatgccgcttgttcttagtgatatactactatgttggttgatatttagccggtgcgtgtgcgacgcaccggttccgggtttgggcttgggctgttgtgtggctgcagagtgcagaacgctggctgtgtatgtataattatttccttccattaagtatatcggtgtgaaattattgttatta

SEQ ID NO: 61 - DNA, 2404 bp, Hordeum vulgare
  source 1..2404: mol_type = genomic DNA
aggaaatactctatatgtgtgcgtataaaagagggcacgaggccaagcctaacacttggttctcctgcctctgcctagttcgccgccaccgccgccacccaccctctcatcctcttcgtccgctctttgcagtgtccgctcatctcggcgggaggtcctcaggcgggcaggttcccctagatccccgggtaagcacgttcggccatcctcgcagcagttcctttcttcttttccagattatccctgctaattttggcccggaagcatgcgatttgtgcgcggtcggtgctggggcgtgctagatctgatcaattacccgagaaacgactagtttgtacggttcttgcatgtgctgttcttgctttgccttttttttttcctgccccggagtgcaacagtcagaacctggaactgatggtttgtgatgtgcgcttagattgagtcctagtagagttataacagccaagaaactgcatgtgggtgttcttgtgtggttttggatcagagtgtatgattggaccatcggttgatttgcttacgtattttccaagtcatatatgttgtgtatagcctttgatttgctcactactataaaatgggagaaaagaaaaagcagagttacaacatttacaactcagatgatgtcgtaggtgctaacattgttgctgcaacgtagtaacattgtgatttctcatggtgaattttcttctgttcgtgtgattttgttggttggtatctggcaataatagctttcctgtcaaaatttatgcaacagagtcacttaatcaaatggctgacggtgaggacatccagccccttgtctgcgacaatggaactggcatggtcaaggtttgtattgctccttttggtcaattcgcctcagtccagccttcatggtgctgactgtggtctgtattctccacaggctggttttgcaggggatgatgcgccaagggctgtcttcccaagtatcgttgggcgcccccgccacactggtgtgatggtggggatggggcagaaagatgcatatgttggtgacgaggcccaatccaagaggggtatcctcaccttgaagtacccgatcgagcatggtatcgtcagcaactgggacgatatggagaagatctggcatcacactttctacaatgagctccgtgttgcacctgaggagcacccagtactgctgactgaggcacccctgaaccccaaggctaacagggagaagatgacacaaatcatgtttgagacctttaatgttccagccatgtatgtggccatccaggcagtgctttccctatatgctagtggacgcacaacaggtaattgtcgttgcaaacacgcacgttctaaaatgtaagcttcgtcctcaatctgagctgagaataaatgttgtttctccaggtatcgtgttggattctggtgatggtgtcagccatactgtgccaatctatgaaggatatgcccttccacatgccatccttcgtcttgacctcgctgggcgtgacctaactgactgtttgatgaagattcttacggagagaggttactccttcaccacgactgccgaacgggaaattgtaagggatattaaggagaagctcgcatatgtggctcttgactatgaacaagagctggaaaatgccaagagcagctcctctgtggagaagagctatgagctgcctgatgggcaggtgatcaccattggggcagagaggttccgttgccctgaggtccttttccagccatctttcattggtatggaagctgctggaatccatgagaccacctacaactctatcatgaagtgtgatgtggatatcaggaaggacctgtatggtaacattgtgctcagtggtgggtcaactatgttcccgggtattgctgaccgtatgagcaaggagatcactgcccttgcaccaagcagcatgaagatcaaggtggtggcaccgcctgagaggaagtacagtgtctggattggagggtcgattcttgcctcacttagtaccttccaacaggtgaatcttgcacctttcttttccttcaattaaacatcgatcatacatgcttatatcatcgcagtggttacagtaaatatactccctgtttgccatactaaccatgctttctgatttttatgttacagatgtggatctcgaagggtgagtacgatgagtcaggtccagcgattgtccaccggaagtgcttctaagttgcgagttgtctgggtcttctgaatctattctggctgttcttttctcaagtccttgccatgtaagctactatgtttgagattgctgggattctgttgactgtattgccggattaatttgttggatcaagattgcgtaccttgtagactcgtaatatgttcagtgggctgctatatttgatcggtgctgaatca

SEQ ID NO: 62 - DNA, 3332 bp, Hordeum vulgare
  source 1..3332: mol_type = genomic DNA
aaagtggtcgcgtcagcaggccgacagcagagcgagatccagagaccaccagcggcagaggactgtccagccacagcggctgcagttatagccaccaccaccaccaccaccttcctccctccctcctccgatcccatctccgtcctcccctcccgtcgcctccgcctcccccgacctccctctccgaggtaaccaacccctccctcaccctctctctctctctcgctcgctctcttgttagcttgctagatcttgctggcccgagatccggccccgcggcgccggatctgggcgtccccggccggagatccggcgggaacgcgggcgcttcactggatctttcttcggccccgtgcctgtgcctgtgcctgtgcgtggatgccgtgatccgccgccgggctgctgccgcttcttggtcggagcaccaccgcctcccgcgccacgcatagatccgcgcctgtgcttgtgcttgtgcttgtgcctgttcgttgctactcggcgaccgctcccggtccccccagccgatttcccgcgtctctcctccgtcctgcccgtcggctgccggccattctcgcctccacgctagctcctagtagtagccatgcagctcaccgctccctacttcccacggctggcttcctccgcttccgggctcggcccccgcggttgctctcgtcggattccagcctgtgatccgggcacttccttcgccgccaaaacggattctttctgcgatttccatcatctgtagtatatatgacagtacagttaaccgcaccgcactagtttcttgtcggatcccctctgaaaaaaagacccagcagagaggagagcgcaggcagccaaagtatgctttcattatttccatttcaaattcgtaagcctacttccttgccttgccaagctggccccgacgagctgattcggtgctcgcgccgtggcgtcgtcggtgttcatcgttgtctaactttgtacggaatcctggttttacgccgtgcttcaagtcgcaccaccgagcaccgcatgtttgtttatttatttatattactttcaagtaagtaagtattgcctgcaagctatgtatatcttaaccctctctagtgctggagtaggtaatgcgtaaaatgcattaacaagatcctaaaaaaaaacattaagaagtctcttttcaagctgttgtctatactgttttcattgtctgctttataaagtttccgactatctttggcaatgcatagcacattagtagctgtttcgtcaaaattaaaaagtggggtttccacgaggtatgtgttcccctgtatcagagtgagtgacatcatcgctggctattaagtaattactagcgttcttgtgctccttgcagatattctgtaggaaatggctgacggtgaggacatccagccccttgtctgcgacaatggaaccggaatggtcaaggtcagaaactttcacctaatctgttacatatatatgtcatctcctgcatctgttaacatatcattttcttgtgattcattatcatctaggctggtttcgctggagatgatgcgccaagggctgttttccctagcatagttggtcgccctcggcacactggtgtcatggtagggatggggcagaaggatgcttatgttggtgatgaggcgcagtccaagagaggtatcctcacgctcaagtaccccatcgagcacggtatcgtaagcaactgggatgacatggagaaaatctggcatcacactttctacaatgagctccgtgtggcacccgaggagcaccctgtgttgctcactgaggcccctttgaacccaaaagccaacagagagaagatgacccagattatgtttgagactttcaatgttcctgccatgtacgtcgctattcaggccgtgctttccctctatgcaagtggtcgtactactggtatggactatttccaccttttattttaatttgatactttgcctggtaatctacctgtatgatttagttatgttatgctgcactcttctgattaataattagaattattttcaaccttcaattgtcctgccatgattatgcttattgtggcttgcataatttggatatactgcagtagtgattgctgtttatttcttactgccctattgcattggggaaaacaattgcaactaatatattgagaggtataatgtagctgtttactttgttgtggctgaaatttttcttcatttgcaggtatcgttctcgactctggtgatggtgtcagccacactgtgcccatttatgaaggatacgcgcttccccatgccattcttcgtttggatctcgctggtcgggatctcacggactcccttatgaagatcctcaccgagagaggttactccttcacaacctcagctgagcgggaaattgtaagggacatcaaggagaagcttgcgtacgttgcccttgattatgaacaggagctggagactgccaagaacagctcctcagttgagaagagctacgagcttcctgatggtcaggtgatcacgattggcgcagagaggttcaggtgccctgaggtcctcttccagccatccatgatcggcatggagtcttctggaatccacgagacgacctacaactccatcatgaagtgtgacgtggatatcaggaaggacttgtatggaaacatcgtgctcagtggtggcacaactatgttcccaggtatcgctgaccgtatgagcaaggagatcaccgcccttgctccgagcagcatgaagatcaaggtcgtcgctccacctgagaggaagtacagtgtctggatcggagggtccatcctagcctcactcagcactttccaacaggtacgtctcttgttcagccttaccttctataactcatctgacccaaaaccaacatctgaaacatgttctatttggctatgtttgtaccagatgtggatatccaaggatgagtacgacgagtctggcccagcgatcgtccacaggaagtgcttctgatctccacgagcgctccactgctgttatcatctagtcttcggttatgtttggttcattcttctagaaatgtattgcgtatttgcaagctatgtttttttccagacgtgacgtgggtactcttgggatacgccacctatatacgtggcggctccatggtgcaagtgcaagtacactatctatgtttgtgcattgtcagtgtgtttgtgggatcagttgtcaaacttgggttggcttgatttgttgttgggaattgtctgtaatagctcatggtttttgctatgtatttttatatcttactattgctctgaggggagaatcatggtaaattatggattttttaaa

SEQ ID NO: 63 - DNA, 3218 bp, Hordeum vulgare
  source 1..3218: mol_type = genomic DNA
atattccccgctggcacggccgcgtagacagcggggcatctccctctccctctcccttctccagtccgtccttgcccaactttccagtgcgtcaccggcctcctttacatctcattcccaccatcaccggccaccaccctcgccgctcccacgccctcgcaccgcacctatatctcgcccctcctcctcccccctctccccacccaccattcgcctgcgcccttcgcttcctcccgccgccgccgacttccccaggtcttctcgctccaggtgagcgtccgtccacctctctcgagtccccggccgccttcgagtcgcttccagtgctgttattttcccccctccttttcctaccgctggttagagatcgaggtgtcgttggggcggtagcttagccgcgtcgcggctgcgggcgtgcgtttcgacggttgtttcatctcgtgtttctctgtcggacgctggatccgatcagtgggaccaagggtttcgcggcagatgctgatgctgatgcttcgggattcattagctatgttgttcgttgggggtggcgagggagtagtcttgcagtagatctgttgatggccgtgtgctgcgctaccagggtgcgaagttgggcgtactgtattttctgagaaaattgcagatctgtaacggctagtcgaaaatctgagtatttgtttcgtacttttgcgtccatgttcatgcagcaatcttgcctctctttgcatgtgtatgtcgtgctggactggtggtggttgtgtgtccgtgtgtgtgattggctgttgttatcttgtgcctccacctgaaaatagtttatggactagtagttcacaaaagaaaacaagcagatcgatggtgtcattgtctgacatggcaccttaaagtggcagaaataacatgttttgtactatctgaaattccctagtcataggattctgttttttttttctttcaaaaagggagaaaaagagcatggttgttcacgagcatatatgccttaaggttctcctgtctcgtcagaaaaatgaccaatgctttgtatcaaccagtcagacaaatcataaattgtccagtctctgtttcaatcgttttagccaccaatgcatataccaaaattgattgagaatacacatgtatcagtaacatgcgttaacctactacctaagagatcaaatctgattggtctgctggtgcttcagagttcggaccaacattttgttaggaatttgaattttcttgaatgatgtatactgttggaatccgtggagttgatatgtgttattctattataatacaagtgccttttgatgtacaactaaatactcttgtttgaataatctctgtcatttcagtcagtaacctaagtaactgctgtaaatgtatttcagtgattattttagttatcagtgaaatgtatttgggctatattaactggtaaatactcgagaaatatattgctgtccttgtaactcacgttcgtgtaggaagaacaactcttctttcttcgtatggtcagtttaatctgtattagttggcagtttttctaggccctgtttgaataagctgttttattatatgcagatcagttaacataaatggctgacgcggaggacattcagccccttgtctgtgacaatggaactggaatggtcaaggtaattgtgattacttggtcacattctataacataatttcttattgtggctgtcatatttttatcttaaaattcattaagggctaattgttttcatctttcataggctggcttcgccggagatgatgctccacgtgcagttttccctagtattgttggccgtccacgccacactggtgtcatggtagggatggggcaaaaggatgcttatgttggtgatgaggcccagtccaagaggggtatcctgactttgaaataccccatcgagcacggaatcgtaagcaactgggatgacatggagaagatttggcatcacaccttctacaatgagctccgtgtagcacctgaagagcaccctgttcttcttacagaggcccctcttaaccctaaggccaacagggagaagatgacacagatcatgtttgagacattcagtgtccctgccatgtatgttgctattcaagccgtcctttctctatatgctagtgggcgtaccactggtaagtgaaaaaagaacaactgtatttatgtgcagattctctttcgctgttatgtcatcttcatcaagtagaaacaaaatggatttatgctctgtgattgctgatcgttgcaattttgttttggtcaataggtattgtcttggattctggagatggtgtcagtcacacagtcccaatatatgaaggttatgcccttccacacgctatcctacgtcttgatcttgccggtagggatctcaccgattccctcatgaagatcctgactgagaggggttactctttcacaaccactgccgagcgggaaattgtccgtgacatcaaggagaagcttgcatatgttgccctcgactacgaacaggagcttgagaccgcgaagagtagctcatcagttgagaagagctacgagctgcctgatgggcaagtgatcaccataggcgcagagcgcttcagatgcccagaggtcctcttccagccttccatcatcggtatggaagctcctggcatccacgagacgacctacaattccatcatgaagtgcgacgtggacatcaggaaggacctgtacggtaacattgtcctcagtggtgggtctaccatgttccctggcatcgccgaccgtatgagcaaggagatcacagcgcttgccccaagcagcatgaagatcaaggtcgttgctccaccggagaggaagtacagtgtctggatcggagggtctatccttgcatctctgagcacattccagcaggtaagggcaaaatttgccccaatggttgttggttcttgagccattctgctatttgaaagtttctgacatgtccatttcttgtgcagatgtggatctccagggcagagtacgaagagtctggtccagctatcgtccacaggaagtgcttctagacagttgttgccagacctattttccatgcatacccttgtctagtagcattattaggtggtggttttgttggacacaatgttgggccgatggcctgtctatgggtgtatctactctattatgtgtgtagtctgatttaatggatttattattggattctacaacttca

SEQ ID NO: 64 - DNA, 3337 bp, Hordeum vulgare
  source 1..3337: mol_type = genomic DNA
cctttacgccatccgcccgccgtattcggtattccttcctttccttccttcgtctcgccccgctgccgcaccagtcgtccgccgagctctccagaaggccgaagccgccgccgtccacgccccgtgaacaggtgacgaccaccgtacaccccatgatcccccacctcgagccgtttgatccgagaaataaatccgtcgagctctacttgcccccatccccatgtagatcgcctcgctagcttcttcttctttgtgtgtgtgctgtgtgggcgaatttcgctgctcgatttggtgcgccggtgggtgatccctgccggagcataggaattttcttgggacgaatgggtgatctgtggatgtgtttgtcgcacgggcttccccctggtgctgttgacgataactgcgaactgttggcctttgcttttgtggggggtttcctcctcgcctccaaatgcttttcgcttttggacgatgtgagaattctagtaccgtgccgtgacaatatcttcagttagcagcagcgagccagcaaggcggattatactgctctttaatgcttccatacttaaactatgtgcgacccgtgatgtcatggattgtgagatttactttagatgtctgggatcgggaatgactcaaagagcccaagtttgtcttactctgcattatgaacttcttttgagttttcctatgcattatggatttgataatttagccgcggcacaccaactttgattagctgcatgtttggtattttgtttggctacaatccgcttccttaggaattaggcccagctagtattgttataaattctttaaatgaaataattgtatcggagagaaactttcgactaaatactgaattctttaacacgttaggcttcaaaaattagtgcgatatttctaaattgatgcttggattatagaaaatttacttgcctaatgcctataatcagacagtgttcctgaagtgctctatcccaccagatgacagttatatgtttacctcaaaaatggtacatctacggacttaatacgggatttgaagggggtgggggccctccctccccttaatccaatcatactttaccaactcaaatttaccctgtaaaacgcccgtaagaatccgttgatatagcattgttgtgtttacctttgtcactttcaagcactctgaacctctgatactatgggtttacttgctcttatacagaagcatctctcacagtttaggcgtctatgcagaaacttgctcatatactaatgtgccattgcagatttctgttacagaaaacttgaggaatggctgatgaggatgtccaacctatcgtgtgcgacaacggcactggaatggtcaaggttgttgttctgcacaaaatcctttgaaggaaaaaagagtgctctcccaaactaactgatcatattcctaatgtttggcaggctggttttgccggtgatgatgcacccagggctgtctttcccagcattgtaggaaggccacgccatactggtgttatggttggtatgggccaaaaggatgcctatgtgggcgatgaagctcaggcaaaaagaggtatcctgactttgaagtaccccattgaacatggcattgtcaacaactgggatgacatggagaaaatatggcatcacaccttctataatgagctccgtgtcgcacccgaggatcatcctgtgttgctgactgaggcccccctcaaccccaaggccaacagagaaaaaatgacccagatcatgtttgaaaccttcagttgcccagcaatgtatgttgcaatccaggccgttctgtccttgtatgccagcggtcgaacaactggtatgtctgtcgcgttgtttcaaacagttgccgctgaagttcactggatagggttgttgacaactttttctttctgcaggtattgtgcttgactctggtgatggtgtgagccacactgttccaatctacgagggatacacccttcctcatgctatcctgcgtttggaccttgctggccgtgacctcacggataatctaatgaagatcctgacagaaagagggtactccctcacaacaaccgctgaacgggaaattgtcagagacataaaggagaagctcgcttatgttgcccttgattatgagcaggagctggaaacggctaggagcagctcctccgtggagaagagctatgagatgcctgatggtcaggttattacaattggttcagaaaggttcaggtgtcctgaggtgctgttccaaccatctcatgttggtatggaagttcctggtatacacgaagcgacatacaattccatcatgaagtgtgatgtcgatatcagaaaggatctgtacggtaatgttgttctcagtggtggttctaccatgtttcctggaattgctgatcgtatgagcaaggagatcacggcccttgctcctagcagtatgaaggttaaagttattgcaccacctgaaaggaagtacagtgtctggattggtggctctattttggcctctcttagcactttccagcaggtagtaattttccccctctcaattgtggaagttgcatacattactcctactgtttttgctaaacaattttttataacgctcttcagggtaattttgtctcagcatgttttcccgacaattggcttagaatcctttattcatgatcaactttcagtttgggttagcaggatatgcattcgctattttagataattcattctgaatatgcttttaattcgatgttttaggaaattggcctataatattcatgttagcagagacgggtcatatcctctgcttgaacttctagatatttctcttacctttttatcagaatatgaaaacaaaatgtatcttccaagaggttctgaaatcagtaatatactatgattgcttctgcaaccaaagaacaagccagtagcttggtggatggggaattggggaggctgtttaagaagtgcttctaggactggatctgtggattagatggcttcttccgaatcaattcttgacatcgatcgatttgtttctaatcgcagatgtggatctccaaggcagagtacgatgaatctggtcccggcatcgtccacatgaagtgcttctaaaaagtcggggaatgtggtttacaaaggggacttgctgccaagaatatatagtagtgcatggtacatggttagtgttctgtagaagatgtgtaccctcacatgagtaaggggtacatgaaaaattcagtatcggttgatcttttcctatcggcacaatgtcatggctttgcatggtgtttgcctgctgtatgaaataatgaaatggaacatatgtgtattccaatta

SEQ ID NO: 65 - DNA, 2628 bp, Hordeum vulgare
  source 1..2628: mol_type = genomic DNA
cactccacctttcgtgttgcttcgtctcctctcccatttgtccccgcctcgctctcacgccgctcgcgtcactccgcgctcccacgaaccacccccaaattccgtcaacgcgccaaccccgaggtatgctttcctctccacccccttcctgaatcgatttggtccgtcgccccgatggattccttctgatagatagatcgccgcgccatgtgtcggcccttagtttttccggcggttccagcgatccttgccaagtttgtgctgcttgctgttctgttgtcgatggtatttgatcataggattggtatggtgccgttggttccggcgtaggatcatatctgcttgtttgcgcagcgtccgttgctggtcaagtcgatgatactgcacgagttccctggtgagcgagcgctgaccacgggccgcagtgttttttcttcttctgttgaccgcttccggttcgggatgaccagtcaatcgtgtcttccgaattaaagacgtgatttcagaaagattggagcaatctcatgatatgtgtgtgctgcttttaccgtgattggcgataatgaagaaacaaatctgctgatgtttatataaaaaaaaaatcacccgctaatcataccatacaatacctggagaaatcttgcgtgatgactggcaaattatccgtttgttatcacccgtttctcttggatccatctgtatacgagcaaatccttgtgatgctcaagaccatgccccagaagcagttacgcagttgatcaccctttatcggatttgattgaacaaacaggctgaaaaataaaatccttctttcgcagaaaagcgcttgagaaatggccgaagaggatgtccagccgattgtgtgtgacaatggcaccggaatggtcaaggtcagctgatgccaatcctcctaaattcagttatcctgtcatggtgttaatccatccaaaattcagatagcatgttgaagtgcagagtaggagtacatttcagcgcgcgaactgatgataaatcctttcgtgccaaaccgcaggctggattcgccggcgacgacgcgccgagggccgtgttccccagcatcgtggggaggccgcggcacacgggggtgatggtgggcatggggcagaaggacgcgtacgtgggcgacgaggcgcagtcgaagcgaggcatcctgacgctcaagtacccgatcgagcacggcgtggtgggcaactgggacgacatggagaagatctggcaccacaccttctacaacgagctccgggtggcgccggaggagcaccccgtgctgctcacggaggcgcccatgaaccccaaggccaaccgggagaagatgacccagatcatgttcgagaccttcaactgccccgccatgtacgtggccatccaggccgtgctgtccctctacgccagcggccggaccaccggcatcgtcatggactcgggcgacggcgtcagccacaccgtccccatctacgagggcttcacgctcccccacgccatcatccggctggacctcgccgggcgcgacctcaccgacggcctcatgaagatcatgacggagaggggctactccttcaccaccaccgccgagcgggaaatcgtcagagacatcaaggagaagctcgcctacgtcgccctcgactacgagcaggagctggagaccgccaggaccagctccgccgtcgagaagaactacgagctgccggacggccaggtgatcaccatcggggcggagcggttcaggtgccccgaggtgctcttccagccgtccatgatcggcatggaggccgcaggcatccacgaggccacgtacaactccatcatgaagtgcgatgtcgatatcaggaaggatctgtacgggaatgtcgtgctcagcgggggttccaccatgttccctgggatcgccgaccgtatgaacaaggagatcaccgcgctcgcgcccagcagcatgagggtgaaggtggtcgctccgccggagaggaagtacagtgtgtggatcggcggctccattctcgcctccctcagtaccttccagcaggtagccatttttctgtcgcatacataatgttttgctactgctcatttctccccgcgagactaatggcgtccccgtatctttgtcacagatgtggatctccaaggcagagtacgacgaagctggcccgtcgatcgtccacatgaagtgcttctgatcagtccatggcttgccaacctgtacctgtcattcagttgcttgaggtccaaatcgcagatgcttgaacgtgtcatggtttccactgcgtcgtggttggctgaaagtgttttggtcatggaacaaatttgaaaggtaaggtctgattgatggtttcgaacgattctgtagggcgtcgggtcagtttcagtgggttcactgaaggtgggttgttcagcatgcagtctggggcatttctgtcgggttcggtgattcagctcgtgcgtgtgctggaaacctgaaacagagtgtgtgtttgtttgcaccaccccggcgtgggtgttgattcttgtaccttttgtagcgggggttcttgtcaaactacctgaaagcttattttgttggtacttaagcatttgtacatttaaattattgaggggattttatgtttgtta

SEQ ID NO: 66 - DNA, 15021 bp, Hordeum vulgare
  source 1..15021: mol_type = genomic DNA
aacacaccctgttgaggttggcgagggaggaccggctagaacggagagcaacaaggtggtggtgtgcgacaacggcaccggggtaagagtccattccgccgccccccctccccaacccccacaccctctgttgagcttggcgagggaggaccggctagaatggagagcaacaaggtggtggtgtgcgacaacggcaccggggtaagagcccatcccgccgccccgcccctcccctcaccgtagatctgcgtctccactccctgtttctttaacgcccttcggctggcggtgattgatcgaggcggatgagtcatggttaggcttggggaatagggtagccaggttcggacggaatcagccgagggtattccagaatctggatcgagtcatcagtgcggagtgcggagttggtcccgagttgaaaactgtaggggaatagaaatgttcgagaacgttctgccccctttctttatcgtatttctgctgggattgctttccgagttgcgtttggaactggcatgtcaatttcatctttaggttcggatcagcttttcatgctttgcacggatatggcataacaggacgctaaataattatgtggaaatcagtaggcagtcacatctttggtttcactgagctatcattggatttttatcgagcacaaataatattcaaattgtaatttgttttcgtgaaacctctagctgatctgttaccagtttcttgattttcattatcttttctatgacagagaaacgcgaaatactctctgttatagtcgggtggttttgctgttctaatttggcacctacgttgcagtatgtaaagtgcggctttgcgggagaaaatttccctacatctgtctttccttgtgtcgttggaaggccattgcttcgctatgaggagtcactccaggagcaagaattgacagttcagattccatcctttattttgtctcttaatgttgagtactccttgtaatttgtgtttatattcaacgcaggatattgtggtgggagctgcttgcgctgatttgagacatcagcttgatgtttcatatcctgtcacaaatgggattgttcaaaattgggatgatatgggccatatatgggatcatgcattttatagcgagctgaaggtatgcatattgatattctttactttggttgtggtgtgaatccctttaaaagatactttctcaatacctttgaatataatccttaattatcttagatccatgtaaatcgtcacactactcttctttcatataggttgaaccatccgagtgtaaaattttactgacagatccgccactcaatcctgtgaaaaaccgtgagcaaatggtaggttcttttaatttctcaggctattttatattgcaaattgagcttctacataatgattagtaaattgaaccccatgatcaacagattgagacaatgtttgagaaatacaacttctctggggtcttcatccagatccaagcagttctttcgctatatgctcaaggtacttactttacctctttaagcacaatcaaggacatagaaatgcacacaaaattgtactagtactccttttacacgtatgtttacttcccaggtttgctgactggacttgtcatagattctggtgatggtgtcacccatgtggtatgaacagattctatctctagattctctgtgatagttgtagaaataccatctgactatctagcacgtttgtataatgtttgctgatgtacttgtaattgtattgagccaaccaaaggagttacccttctaattttgggatcaggatatacctgactttttggaggtccgtgagaaaaataaactaaaatcactacttaaaacccctccatttaaaatttctattttggtttcaaacagagtttaagaaaagtcatggtgttcagtcatagatattgaagagagagggaagataaatgagaataaaatggagaaaatctcatgaaaattacatgctagtcttataattttgaataagatatctaaatttataaaccttaccctctattcttaaatagttgcaacccactacctatttttccttttcatttagcgatgccacgtcatcaagtcatgcatgtggtcataagttacaatttgtgcactaaggtatccatgcaatgttacctcaataatcacacatgtcaatttgttttactaatttttgtgttcgctttcattttgattcacagcccttgtttcatttaagtttccttgtttctttgtagagatcacagattcacagccctcatgaatttcccaattgtccttatttttaccagtttctttccatgcagggttgtgccaaattttattagttattttctgtctgtagctttcattttgttgctgttgttttatttacacatgcaggtgcccgtggttgatggttattcttatccacatctaacgaaaagaatgaatgtagctggaaggcatatcacatcctatcttgttgatctgctctcaagaagagggtattcccttaccagttaccatcttaagatgttaaagttgctctgatgatgcagtcttcagctttcttatatttcctcatcctctttatgttctatttcataaggtatgctatgaacaaatctgctgattttgagacagtaagagaaataaaagagaagctatgctatataaggtgagttgttttgttgttcttatttcttgactacagattgctgttatatgtcataggcatgacataaaaagatgtacagctatgattacaaacgtgaataccagctaggacttgaaactacaattcttgttaaaagttacactgtaagtatattatcctactttgttttattgttctgtttatagtttgggctaaattcttgtgatcagcttccagatggaagagtaattaaagtgggcactgaacggtttcaggctcctgaggctctttttactcctgtaagtttgttttccttccattcttgccaaaagtcttccggcgatagatagctatgcagttctctgcaaaaatattaaatattaaagtgtggtagtctttgtaaaaatatctactgaacaggaactcatagatgttgaaggtgatgggttggcagatatggcattccattgcattcaggaaatggacattgacaaccgcatgacggtatacaaacctttcagtagtcccagtacaatatagtaaattttgcctgtccaatctttctgttatttttattgcttgaagtatttagatggaacaagtatacgaataactgattggttatattgtacaactgcagttcttctggactacgtttatctagagatatgcactacttgtgattatctacataaacatactcatagacaatgtatcatgaggtgcatttgctattgatggagacttaattgagcgtctgacattgcatcttgagttgtatgagctttatgtatgtatgttatccccttagactagcatatacctgcttccttttttcttaatttgaattctgctaatgccttgtaagggaacaaatgttattaaattttcagtttgatatatattaactaaagaagaacctgagaacatatcgaagttttagtcatcattcattcattcatttagagtgtctacttccctagatagatcactgcatgctggctactattttttattcgatgttcgataatatttgcagctttaccaacatatcgtccttagtggaggaagtaccatgtatcctggtctgccaagtcggtaagatgttaattctgtagttcatttcttgcattttgtgctatttatcacagtgcattctgagtcacctgtttccaatatcatcacttacacaccacactgtttttctcaccttcttggctgtttgctattgttctggttctttctccctgttgaccagtcattgtttgcgctgatctatacaaggatctaggtttcgtatgactaacaaactgccaccttttttaaggctggagaaggaaattcttgatcgctacctcgacgtggttttgaagggaaacaaggatggactcaaggtaattttgtttaattctcctctgatggactgcacagttgatattttttgtataactacatttccaatttgtaccattttccttttaagctggcaaactctagtgagcaatacaactcattcagcccttatttatcaagtcttgttgcctcacctttccatcaaggagaatataacttatgttttgcaaatacaggcaatctgatcacattagcttattaaaactggaaacagtcaaaggggaatctgaatgcatttaccagaacaccacattttataatcagtaatactgtttattcccgttctcctttcataacctgtatgttcttgagtacgtacagaagttacgtctgcgtatagaggatcctccacggagaaagcatatggtctatctaggaggtgcagtacttgctggaattatgaaggtaataacttttagaattttttagctttcttgcctgaagtattgtagtttagttcacctcttaaatttaaaatgggttgtaccggcaaatcctaaatacataatgacacatattttgatgtttatccgagagcagcgaagttatacagaaaaccaagagtaggaacttataaggatgcagcgcctatactacctagttttaacgtgataaatgactgtttagggggtgccaaatccacaaatcttaagtttgcaatatagtctaaggctatggtcacactgtgtttgtttatgataatccagcttttccgaccagtttttgcttattttatcattttgtggctatattttcatagcagaatataaaaaggttcagcacagcagagcctaagtagatgacttactatcgaaagtattgcctaggaagtcctggccaaatttaaatttgaatttgaactgctaaatactcagccgggttgaagtcttcacttaacttccaaagaaagcatgtgacagtgccatggaagggcggggggcatcagcaggccggaagtcggcccatcagccacggtacgaaccagaccactacccgacggacagacacatcatgaggcaccatgagcttgcagattaaagcaaagcatcttggggatctcggaggatcctacccgtgcgtaaccgagctggacatcctgtgaaccctagaccttgttccttatataaggcaaggctagagttagactatagaccatctaatctcgcacacacctacgtgatcctagcgatctccattgcacaccatattcaggctctcgcatgaggctcactaccataaatataatcacctaggtagctcaacacaaggcccttgcgcaggcacaactcccccttcagaaggagtgcaactcccttgcaactagatatgattggtgggcaaccacaatagagctcaatcgaagccggtgaccaatctcgtagccgcggctctggtcgacaatatccagctcgagcgagatcacccaacgaccgaaaagtacaaccgcgctaagccatgatcaagacgatgattgtggaacatggcgagatagtaaatcgtgcaatcagttggcaaccacctctcagatgcgcactgacaccgacgtggtttgattttcatgtcctaaccacattccaagccgtcaaattgacagtgccaggccggcgattcggcctcgaggctcgcatggctttggacggaagccgaccatcgcactcgtcggcctcgcatggtctatgaccggcttgggaaccagtcggacgtgcacgagacatacaagctctccgcagcgcctaagcgtcctagtacagaagggatgtcgagatcctcatcccggctcgctcgtagctgcatttatcaacttgccatgcttcagctacaaggtcctagagcaccccgtacgaaaaaaattctgggtgcggaatatcaacaagtacattggtgttgccaagccggatcactggctggccaactacctcaccgttgtcaacatgaccggggggggaatgagttaaacgcgctccactacatcctctgcttctcaggcatgactgaacgacctaccacccaactcggtcaaccagtggcaggactttgaggatgcattcatggccaactttgaggacacttaccagaggtcgggcaacgcctatacctcggtaattgcaaccaggaagcaaacgagacgatccaccagtgattatcgcggtaactcacgagaaggaactctctggaagaaggctctcatgagtaggccatccaagctttccagctcggagggcaggacaaacacctcaggcacaagctggctagatctggagcatgagcgagctcatggacatcgccaatgactacgccatcagcaaggaggccatgcaggctggtcggaagggcacatccggcaagagcaatgacatggccgagtccctgagggacgattcgggcgcccacggtgcaactggaaccgcaagcgcaggcatgacgagttggattcctaccttgttgccgtggtcgagtacaacgctccttgcagaggaggcggcttcggcaagtagcagcagcacccatggcaaatataagggcaaaacccgaaggaaaacctatgaggaaatcacagatggcccctgtagctaccacaattacctggcagctcgacgatgcgcatgaacctagagtgaggcttcaacgccgctcccgagaacgccaagaatgactctcccaacggtggaggtaaagaaggtgaacgtagtcttctgtgtccttgagtccaagcgggcccggaagatcacattgcgtgagccgtgaggtcaagaaaagagaatgaaggaagcccaagctaatatgattcaaactttcagaaggcgcaggtaccgacgtgcccaagtggcttgatgggtccgactcggtgatctcttttgactggaccgatcacccaaactatattccccacctagggagatccccccattattgggggctgccagttatccaacgtccagatggatggtggcagcgtcataaacgtactctacaccgagacgacggagaagatgggcatcttgttcgtgcacgagaattatgcccagccttgggtcaaatctccttggatgttattttttgcaccccggaaactctcgagttgagacactttccattgaggtcgtcccttcaagggcgcttatcatgctcttctcggctgcccaacatacacaaagttcatgcaatccctgttacgtgtacttaaaactgaagatatattgcgcaccaacaagataatcatggtcatcgacaacttcaaacgcttgcatgattgcgagggccaatattgacctagctaaatctgagctcgttgccgttgagttgatcgaaagctggaagatgatggatccatagggctactctctgagctagaaggccaagccgaccttcgctttccagctaggccatgacacaaagaaatttaaggtgcacttgaccgacaccacgacgagcgctgagatatcatcgacctaggtagtgcataggaaagcgtgcttgtactctctgtgagaactgtgacatgtaaggctagtgaagaagagctagcccggcttctggctgtcgggttcatccatggagaagaacgtcgggttcatccatggagaagaactgcacttggtgcatatgcattgactaaccggtctcaacaaagcctgccctaaagatccttccccgctcccctgcatcctactcgctatcaagggatctgatcaggagatgacctcgttcgtcaccccttttggagctttttgttacatcatgatgcccttctggctcaagaatgctggcgcaacctatcagcgcaccatgcggaaatgcctccacgaccaaatcgacatcaatgtctaggcctacgtcgacgtcgtcgtggtcaacacgaagaaacaggatgatctcctggccagttcaacatgtgggttagcaaaaaatccaacgacgtggaggccattcagtggtagacgtttgctaacccacgtcgattcaacatgaagctaaactagagcaaatgtgtgttcgtggccaccgggaaaactggtcggcttcatcgtttcttagcgcggcatcgagtccaactctgacaagataaccgtgatctccaaactcggcaggcccgagaacctgaaggaggtccaaaagctagctcgttgcatcgtcaccctgagtcttttcatctgtcgactcgactagaaggctctgtcgttgtatcgactcctcaagaagtcggacaaattcatctagaccaatgaaggcccggtcggctctagacagcctcaagtcgatgttgtctagtaacctagtcctgatcgtttcgaaagagaaagaacccatgcttttgtatatctggttgatccttcacaggcgatccggcagcgtcacgacgatatccgtgttgaggtagtcagaccaaaaggtgttgaaagtgtagtgatgcctgccttgcctcctccatatccgggtacaaggctaagtaattgttactaaggaaaagagccgagcaaaggtagaaaaccaaaacaatgaatttggaaagtcttttaacacttacatgacatgaccagttgggctgttcagagcttggcccgcaccaacctcactcagtgtcggccttcttggcggtctccttcaggtccttgatcttagtctccttcgcctttagttgatccatccgattttgcaattcggtgctttaatcttggccttaagggtgtcttgcgcctccttttatgcccgagcaagccccctgtagctccaggatcatcgtttggttggcttcgctttgcttcttcagcaactcggccgtgcaatgtactcagagtcgtcactagtgatgattatgtcatcatcatatagaagaagagtccgaccacaaggagaaaggtgggcaaacaacgtagggtcatcaatgctcaccaaaaatccaacgacagtaacaatagaggcaaaatgctcaaaccaggtatgtgggctttcttaaggccagagagtgacaaagacgacataccatgccaccaggaacaaaatatccaggtggtggctgcatgtagagctcctcacacaactcaacattaagaaatacattcttaacatcaagctgagacacggactaatggcgaacatatgccacaacaagaagtgtgcagacaatggtcatatgggccataagagcaaaagtctcatcgtaaccacgaccatgttcttgctgaaagccatgagccacaagatgagctttgtagcgctcaggagaatcatcagtgcaagtcttaaccatgtagacccacttacaattgatggggcgaacacaaggaggaatagaaacaagatcccacgtgttggtgcgctcaatagaagtagtctcctttgccattgcaaactgccattcgggatgaacaacagcatcgcgataagaagtcgactgaagaacaacatgctagcactataaaaaacatagtggtcaataggtagaagcgggcgatgacatgccataagcaagctaggatgaggaggatggcacatcagaagtagatggctcagtggtagactcatacacaacatgcagacaatggtgctcaagtttttgcgaagcccatcaatactcggatagctagtctcaataggtatgaaggtaatcgcaaagatggtggggctatcaaggtgtaatggcaaggaaggaaaaaattgtgacggaacggataccttcgtcacacttaacctttcacgaagtcggggtaagccgaccttgcttccggttgaagatgctctcaaaggatggatggccgtcgtcgatggcaatcatcgatggttgatgtagtcgatggcacgatacaagtcaccggtggttgatgaaggagcaactgtccctaagtagccgaaacaccttaggagctcaaatcacaactcaaacaactacaaatgcaatgggagccaaaatgggttaggttgcagaaggctatggtggtggtgcggaagttatggtggagggcctagtaggcaaagatgccaaatatctgaaaaattgatggagtcaaatgattttggaactacttttgtgggatgggggatgtcaatagctacaaatcaagctaaggaacacgaaaatttgactctggatgaattagttatggccaaaacggtgaaaaggttgatgctgaaattttgggtaatgtctcttgttaggccggatgctccggaagtttcgggatgaacaacagcatcgcgataagaagtcgaccgaagaacaacatgttagcactataaaaaacatagtggtcaataggtagaagcgggcgatgacatgccataagcaagctaggatgaggaggatggcacatcagaagtagatggctcagtggtagactcatacacaacatgcggacaatggtgctcaagtttttgcgaagcccatcaatgctcggatagctagtctcaataggtatgaaggtaatcgcaaagatggtggggctatcaaggtgtaatggcaaggaaaaaattgtgacggaacggataccttcgtcacacttaacctttcacgaagtcggggtaagccgaccttgcttccggttgaagatgctctcaaaggatggatggccgtcgtcgatggcaatcatcgatggttgatgtagtcgatggcacgatacaagtcaccggtggttgatgaaggagcaactgtccctaagtagccgaaacaccttaggagctcaaatcacaactcaaacaactacaaatgcaatgggagccaaaatgggttaggttgcagaaggctatggtggtggtgcggaagttatggtggagggtctagtaggcaaagatgccaaatatctgaaaaattgatggagtcaaatgattttggaactacttttgtgggatgggggatgtcaatagctacaaatcaagctaaggaacacgaaaatttgactccggatgaattagttatggccaaaacggtgaaaaggttgatgctgaaattttgggtaatgtctcttgttaggccggatgctccggaagtttcggaggtcgcgggaaaggtcaggggttgaccgtggatttttggtgtaaactctctgtttagcccaaaagttccgggggtcatggaaatacttccgagatgaaccttaatttccagatcagagaacgggggcggaaaaactcgatttccagctcggaattgaaggggtaaaaggagaaattggggctagggaacgccaagggaggtagatctacttgccaagcactagatccacaaaaagaaatcaacaaaaactcactagaaaaactaaaatgcaagaaatttattggggctatttattgggaaactttcgaaataggtaagaaaaattcgaactaagggatagaaagttgggggtagggctccaaattcgtggcaacgtggctcttgataccaagatgatacggggtaaacccgagggttgcccgatcttggaagtggattcgaggaagaacacgatgaacacaaggggaaaacgtggagaaatcaaagggaaaacactctattggacaagatccacaccaagtactattcaaatcacaagcaatacatgaggtgcatcaagatccaagaacaacaatggaaacaaagatacatgggtagttcatccaaatctctaggagagatgggccttgaattcaagatggatcttccctcgaaaggggccttgacatcctctagggatcttctccggtggaggcctcggtctccatatgagaagtagaggaaggagcaaagcttatctatgaatgagctatcactttgctaaccctagaaatgaggagggggaagagtatatatagtcctagccaccaaggggtaagtgaggggcgaaatgggaaagatacaacccacttggccaagtctgcgcgggtaggccggaagtttcggggacggccggaagtttcgggcaccgtaggttccgggcaaggtccgggctggtttcgggctatccagagagttggcatgcccggggttgtgttggacgctggaggccggaagttccgggctggtggccggaggttccgggcttttctgaagcttgtcctcccttcttcttcgttctcttccaagctcccctcgccgatggtgtaggtgtacacttgcgccctgactcctcctcgtcctccgtgaagctccggcaatacctatgcatgcacatgtgtggagtgtcaagtagtataccatcctcgaaagggtcaagtgaacacgtgcaaaggagatgattcactttcatgtatgtggagttgacgtcgcagcctgtcacttgctaaacggactcttgtcgtgatgatgtccgtaggatgctccgcatcacataggaggaaggcgggcaagaggctacgccggaataaatgtcccagaggcgaatgccacgcatatgaatatacacaaggcaacaagctcagtgtagttaggtggcctttgtttgggctgcagctagtgattttcagattctaggtctttcaaaatcagaatcccaaacaaagacatcagattcctactcggctttgcagaatcgattctgaaaattgcactagcacgcacccgaagccggaagcagcgattttggtgattctagcgattctactccttcccacaaaagaaaacgattcggttttagcggccacccctatttccagtcaaaattacaacaaatgtgccaccgcaatcctcacaaatgtgccactcctctctcatctagcctgctattcccccagccgccgcccccgttctcactctcatcccactagtgatgctccacctggataggtactggccagtggccatcgatgtcgtcctctcacaaggccttgtaggtcgtctcctcgtgcgccggaagaaaccgccgtcgtgcctgagtagccacgtgtgtgggcgccgtgggctccgaggctgtcagaggagactggctgtaggggccatgtgcgagggcgccgaggacgacggaaggaggccgtgtgccgtctggcaaacaacccagtgccgttgactttccagggcggcggctcgccggcggggtgcgaacccgaccctgaacccgcggacaagtgctctcctcttcatggccttctctgcctccactggcatggttgctggtgttgacggcgagcatgtcatcgtggtgttggagttgaggctgacacttactggaaaaggctgcaagtgttgtgtgtacgaaaaggaacgacgagcacgtcatcctgttcttcttttcatctattcttctgtcctgctcttcttctcatatacggcaaacagtgcactactgccatttcaaaaaccctatagtttctacagctatcccagagcaggctaaacaaacaatcagattctgattcccagaatccaaagacatggctgattctcaggaatctacagctgaagtgattcttacgaatctgtagcccaaacaaagggggccttaccataaaaaatcaccgggcatggagggatggtgacatagcctgacgatgaagacatattacctgtttttttttggttcttttttttggaagccggtctcgcaggcactggcttgagtcaacacccaactgaaagaggtgccacgaccgaagaagccgcacgggaggtctgggcgacacagaccgaggggctggcggctgttgtccatacttccttaactcgacttagtctgagctctcttgaattttagtgtgagttgaccaagcctaatctaattcgctcgaactcaacttgtttgcaaccctatgtatgaggagaggagagaaaagatgggatcagtggatagtggagaagagctacaggcagttttcaggcaataaacgaggtgggggcctcgtgtgtgtgtggcttttaggaaggaaatcgtgaaaactgggcgggaggataggttgggtcattgggtgggagaggacgagaggggaaaggtggaggtcatggaagcgaacttaccaactcccaaagattttgcaggcataaaccatgttgggctcgggtgtgtgaggttcttaggaagaaaattgtggaaaccagttgggagggtgggggagggtggaggccatggatgcttaacaccccctccccctcttattgaacacagtacccatttttttgagcaatcaaagacagtaggagaggctcctagaacacagtacccttgtgagcacttttgagagaccgagtgacacttttctttgtgctgcattgtatacgtcggcatgtcataccactgaaaaataatgcacaagcgcacgtgccaaagtctaggacttgaaccccacaaggaacctgaccatgtaagctatgctttcaccgtttttctttccgctaaccaatcgtggtggtgcattcgaatatggaagctactaacaagaggaatatattgaaccgaagtttagcataaaaaatgaaaccatgggcttttatcatgttttggtctgctggtatattttgctgacttgtccatctcgaacaaacaggatgcgccggagttctggatcacaaagcaggagtatcaggaagaaggtgttgcctgcctaaggaagtgtggacaagcataaccatgtacaacgtccaaccgtcctacctttgttattattctctgtcccataatacaaaagcgtttttgataccacatagtgtcaaaacgctcttatatcatgggagtaccaagcaaggatactgccccccccccccccctccctctagaaatggcatactcagcataaatgatgaatgcatattattactttaattgttagaaaatactccttccattcttaaatacaagtcttctaaagatttcactatggactatatacggaacaaaatgaatgaatctactagtccgtagtgcaatctttaaaaagacctgtatttaggaacagagggagtagtaggacaaatagttatgatcttgcctaaggaactgctgttgtctgtccttttgatcctcagtgaataatatgtgtactatataa

SEQ ID NO: 67 - DNA, 5849 bp, Hordeum vulgare
  source 1..5849: mol_type = genomic DNA
ccgccctgcggccgcagcaagatcttctctgcggtgccgcgagacgagagcttcctcctccgcgaaatcctccaatacctctccatccctttcccgcgaggccgaaaattttcaaaaatcctcggaaaccctagcgccccgcgtcgccgccgccgcggagtcggagctcccccgcctttacccgccgccggccatggaggcggtggtcgtcgacgcggggtcgaagctgctgaaggcgggcatcgcgctgcccgaccaggcgcccgggctggtgagtcgccagatctccttcgctccccgtcgattcgctggagattttcgcggggcgttatgcgcatgcgtgaccccaccctgttggatgcgtgtgcgtgtttgtggccaggtgatgccctcgaagatgaagacggaggcggaggagagcgagcaggccgacggcgcggcggcggcggcggtggtggaggaggtggtgcagccggtggtgcgcggcttcgtcaaggactgggacgccatggaggacctgctcagctacgtcctctacaggaacattgggtgggagatgggggacgagggccagatcctcttcaccgagccgctcttcacgcccaaggtcgctgccattgccctccctgcttcacttcaaagctcgttttaaatcccgtggtgcctaatagccttgttagaaattaacacaacattggatcaggtaaaagttgagggttcagttttgctaggttccaggattaattgggtctgagttgtgtggtcttggctgttgagtgttgacacactaacttagaaattccaacaagggactatggatcggttattcctaaatgacattagctattccttttgtgggcaggctcaattcctctagaatataggtccatatgatatacaatccaaagaaaatactctatagtccacatttcacaactgagcccttgcggaagtccatttctatggtcaagggactatgtgaggcaaaggcccacccgagcaataccattgtcaaaaggtgcatatgcacgatgattgcaaacttgagacggtctgacaaaaacaaagtgaaaagaagaaaatacagattatatgcaaagcagcttgcgctaaccatgaggtcacattttcaaccatcacctaaaaatccttcctgttgatatattaaaatcatctgctacatcctcaagtgatatattaaaattttctatggttactgtgagccacatgcccaatttgggagttttagtgtgaaatacttctgtatttcggtttacttttgaatcttactgtacaattcaagcttggggtcaattttgatgtgcatgtataaattctattgtatgttatatttgtggccaaccttgccacaaaaagtttctctgacaaaatggctaccgcaaattcagtaaagttgcccatggagccgagtctttaacaagtgggccaggaggctaagaaaagggcagtaagtcacattctcatttgtggcgatgaagcaaactcatgactgtttcatgactagagttaggcgtgacttggctaggcatcaaaccggacaacccctagactttagtttgaacaggttatctgcagctgtatcaattggaaattaccaacatatagttcccagtagtcttcctggtccagtgctttccatgttgatatcattggaattaaatgaaattataacagtggcagatattgcatgatgtagcatttaaagtatagtctgaaggctagcatacaccattccttgctatgataatataaggccaaaaggaaaaaaagactcaggccatattaatacataccactttttcctcgatcgttaaggttgtggatttgttacaggcttcataaattttgaaggaccagcttttgattgttgtgctgttctatataatcaagttagttgtggaagtcttttccagttctacttctgctatgaaaaagaatgctctcaaatggttagtttagtaaaagtagaaaatgtatatgtattttcagaagcctttgcaatgccacctaaataaattttcacaattctgaatctgtaatacaatatatctcttgattgtttgctaaatcttttcctgttaacattatccatattttagtacagctaatgcattgcttttaccaatcgttttggtcttgcatttggttctaattctccaattctgtcatgttctctgcaggctctccgggagcaattagtgcaacttatgttcgaaaaattcaacgtatcaggattttatgattctgaacaggctgtcctgtccctttatgctgttggccgcatttcgggttgtacggttgacattggacatgggaaaataggtaatatcaccaaatccagttgtatcttgaatttgtattgcggctctgttgatttcacatgtgacctttgtgtaacatctgtatgatatgatatctgttctgaagctattgactttatgtttctttggtttggtgattttatgtttaatactccgttcagtatcttttacttactcactctagaataaccttggtgaaaaccagcacatatcgaagacttgctgggaaaacatgcattcccttttgagctcaaaatttgtgcaacataattgtcacccagtgatagatgatctgtaagcacattgcaagaacatcatacagggatgacagaaattcttctaaatggtattgcaatgatgcttatgttaaccctcttcagtcactagtatagtatacccaccatgatttgtatttcaaatgtttcagtcttgtcttctggtgtgtgtaatttgtacatattgtgtcacattgtcacatttccttcatcagaagatcatttctctctgcagctttattattttcaaaagacatccttgtttactcgaacggtttgttcatcttcttctgtagttctaacccaaatagggttcctccctcttggtcacaaggtgtggagttaatgtaacatatttttgtgtggtttgtcaccaataaatagatttttgtattagctttataatccagtatatatgtacagttaacacaagaaatcagtatggattgttcgtgggcttgtgaagaaatactagtagtcttaatccacgaacaagttccatttattagtttatttgttgattatttgagatgttagttgtaattgtgcttcacaactgctttatatttgtattggttcatgagttgcattttgattccttttttcctcaggagctttttttaaaactatttttagatatgttaataagttggggtacttggctcccccttcgttacaatcagaacataaatatttcagttggactagtttagattctttcagttaactagattctgcagcatgatacagtaaaaccaagccagctaactagattctgcagcacaatacagtaaaaccaagccagttaactagattctgcagcacaatacagtaaaaccaagccaactaactagattctgcagcacgatacagcgatatcaagccaaccacttgtatagatatattgagacctgtccttaaaggggaataattctgttgagcattggctgcccagtttgttctttaaattaaatgggataaatttttataagtgcccttctattgtattttgacaaacatgtctcaatcggagcttctagtgtattgacggtttctctctatgttaccagatattgctccagtttgtgaaggtgctgttcaacacgtagcatcgaagagatttgagattggaggaactgacttgacaaacctatttgcgcaagagctaaagaagtccaacccatcagtaaacattgatatctctgatgttgagaggctgaaagagcagtatgcatgctgcacagaagatcagttagcctttgaagctatagcgagcacatgccagccagaaactcacactcttccagatggacaggtttgttattacttatgttaccctgctttggtgtaaatgatgtgctgttcctttacatttatggagagcgcttagtgtgcaatttctctctttataaaatgcatgatagttatctgaatcatcatccttaggttgatcaagtgctttggtgtttatttatcaccctgaatgtatagaaccactgttctctaaacactttttcgtccaggttataacaattgaaaaagagcgctatatagttggtgaagctttgtttcaaccaagtatcttgggcttagaagattatggtattgtccaccagctaattactagtgtttcaaacgtcgcatcggagtaccaaaagcaactgcttgagaacactatgttatgtggtggcactgcatctatgactggttagttattactcctctgcaagatgcttttttcttggttagaactcttgggtttgtcaatcttatgttctactgtacatggaaaatgcatgccaactattagctataaatactagtaagctgttaggcttactgtttatggatgataatatatgctttcgaaaaactacattctgaatgcatgtgcatgctgtatgaattgattgtctgaatgctagtggcgtgtgacttatgcagcaatggtctagtttgtttgtatactatgtccctgaacggaagaaacagggccagtttggagtttccctcatttgagaagccatggcgttgggacctggggattccatttccttggaaagaaatgagaatcttatgtaggactcaggaatatcttgtactcctgttagtgtccgtgtggatacgcagataacacaatcaacattatgctgaaaatgtgtggcagagcattttggaagagctgttggctagtaatgctgattatagccattgttcccaaggcgcccaggcagcgccttagaattttgcccatcttaggccattaggtgggtgttcaccttaggatgccttaccgacataggtcattattacttacaggctgctttgcgcaagcttctttgtatagcacgactggtgccttgcaattttctttcccatcgcttcctttgcttatgctcatattgatttcgtcaatttacacatcctaacccatgagtaataacctactcctagataactgactgcttctttgcttacttttctgaaggtttcgaggacaggtttcagagagaagcaaatctgtctgcttcagcgatccgccctactcttgtgaaggtaataaccacctcttctctcctctccctgaaccgcggcgctcctgctctccgcgtgcccagttactaacctgcatcccgtcctccaggcgccggagtacatgccggaggacctggcgcggcactcggcgtggctgggcggcgcgatcctggccaaggtggtcttcccccagaaccagcacgtcaccaagggcgactacgacgagaccggcccgtccatcgtccacaagaagtgcttctgaccgagaacgaaccgcaggtctgcgctctttactcaagtcacaggatgcttcgtgtgtcacacacaccgcactcgtacgtgttggcaacggatgaatgacgtgtgtttgctgcatatgcaggcgcgtacgtacgctcggaccagcaaagctctactgcgtgtaggggccggcggcactggcactggtgtggtgtggtgtccttcctcgtcttatgctgcgcgtctctgagagagagagagaggggctattcatggcctctggctatggtttagacgtgtcgttgctacctagcttacctagctatccattcgcagattgagtaggatctaagattggcgtctattttttactagtaggggtgtgctagctaggagctagcccattgtacgtgtgtcgcaccgttggaaaatagttagctcgcgatgtgcaccgcaa

SEQ ID NO: 68 - DNA, 8641 bp, Hordeum vulgare
  source 1..8641: mol_type = genomic DNA
cgctcgtcgtttttttcctcccctctgccccggccccttccgagccctcgctccgtgccgtacctaagcgtcgccgccgacgcctcagccccgcagacccggcacgccatccgcatccggccctgcgccccgcgccgcgccgctccccagctcgccgactcctccctctccggatctccagccatgtacggcggcggtaagatctctcgcccctgcccctgctaaaccctaactaaaccctggagatctcccgccgcggccgctaacttctcccacccgcagacgaggtctcggccatcgtcatcgacgtgggctcctacagctgcaaggccggctacgcgggcgacgacacccccaaatccgtcttcccctcggtgagcttcccctgccgccctcgaactgttcggattacgccgggtctgtgagtttccccttcaccagggctgttgtcataggtattagttcgttcaaccgggaccggaaccgattcttagtgctgaatttgcgtgcattgcgaccgcgcaagtctgtgtgctggtgatggacatattagtgcttcaatcattcccaagttttcgaatcaacggccttggattctggttccgacatggcctgcttgctagtgtgtcagctcattgccatattgggtcaaatcgtaaatttcgtagcaggcacgccctagtctgcaaactataagtagccacattaatcctaagttgacttcaggcatcgaatcaataaactgcgataggacctgcacctacctgttggtttcagtgcagcacgtgcaatctttgtaatctacatagttggttcatgattcaggctctaatggctcagatttgccactagctattactgttagctactgtgagcctttcttacatgctgcactgtgagtcaaaaaacaacaactgattttcaagtgttagtgggattattgggctaatttttgcagcctggcagttaattgctaatttcactctgtttctgatgtaataagagagctactcatgtaataacattcaaatagaaaaacgagaaatactgtgtgatccgcactaagaaaatggtttgaatttggccatttaatgccatgtttgggtttagtacgttttcttctcctttgcctgaacagagctcagaaattatgttgttttgttggttcaagggtatgtgagctacctaatttggcccaatatgaaattttttgtgcattgcgactgcgcaagtttgtgctgttgatgggcaaattagtgcttcattcccaagttttcgaatcaacggacttggattctggttcagacatggcctacttgctagtgtgtcagtttattgccatattgggccaaatcgcaaattttgtagcaggcatgccctactctgcaaatataagtagccacatcaatcctaagttgacttcaggcatcgaatcaatagactgcgataggaccttcacctacctgttggtttcagtgcagcgcgtgcaatctttgtaatctacatagttggttcatgattcaggctctaatggctcagatttgccactagctattactgttagctactgtgagcctttcttacatgctgcactgtgagtcaaaaaacaacaactgattttcaagtgttagtgggattattgggctaatttttgcagcctggcagttaattgctagtttcactctgtttctgatgcaataagagagctactcatgcaataacattcaaagagaaacaagaaatactgtgtgattcgcactaagaaaattgtttgaagttggccatttaatgccatgtttgggtttagcacgttttcttctcctttgcctgaacagcgctcggaaattatgatgttttgttggttcaagggtatgtgagctacctaattgggacgttttggccagtacaacttgtcacactcagtatctggttttgatatgttcaggttgttggttcaattgaacaagcggaagatactgatgaagctaagccagagaaggaggctgactctgcatcagatcctaagaatggatccaagcctatggatgtggacaaagccaagacaaagcgcaaattttatgtaggtcaagaattagagtttaggagggatcatatggaggttagtaaccgtgcattcttggggtgatttgttactcatgatttctattaactctcgcttattggtcccctctccacaaagcaggtgatctcaccgatgaaagatggaacagttactgattgggatgttgttgacaacatatggaatcatgcttttaggtaaatttatttatctacttgatgcagctctgagcaatttctcctctttaacacggtccatccataatcaacaatgacaccagtgaactacaattaagttactactagttcaagcttaacatttagcattctgtgttcatttcactgattatactgattgtgaaattgtttagtttgtgagtacgtgggacacgattcgttgttttccctcctgttttatttcatatgttggatgctttgtcttctgtaacagctaaggttgattaagtacaatgatttcctcgttacgatgctatgcaatttgttgaagctactatttctttggatctactatagtcacactgacttgttctatatttcagacggcggctattgatcaatcctgaagagcatcctatgctcatagcggaaccatctataaacagtgcacaacaaagagagaagtatgtgtctatgtttgtttctacaatatttatattgctaacccatatcaatgctttcaagcctgactcttattttcatgttctatagggcagcagaacttatgtttgagaagtacaaagtgccagcgctattcctagcaaaaaatgcggtatgtctccctccgaagtaatctttgatgcaaccagtttattattttaattgttgattgggttgtcaggttctcacatcttttgcatctggacgtgctacatctctagtggttgacaggtcagcattttcttgatgacatttttatctctgcaacctgctgttttacttcaaaatagatgaaggtcccatttttgccatgctagcccgattagttgaacaagtccactgtgttgtggtgtctgcttggttcttagtttcctactcgatttctgaagtaaattgtttttcaccaatatacgttgcacataacgcacagatagtgtataacagtccatccgcaccaaggaaatactcatgaagaagttggttccaacttgtaactgttaatgcttaaattaccctatttcactttccttgatttaaacattttaatctggttttgtgcttgggtgaccaccttgattccttgagcatttcataagcagtgtattagacttgattttactgctttgggtctttatcatgatagaaatttctggaatatgacagagcgatcatgtttggtgcagtggtggtgggtctactgtggtttctgctgtgcatgatggttatgttctgcaaaaggtatgttatgctatcaatatcctgattttcaaggggaggtgtagcgatttgcctgtttttactttgtacatttcatttgaaaatttgattaatccaagctgctttaacatttgataaaataaaattctaggttgtattatatggactctggtatatgtaacattgttactaagggctagttcttttggttggcttaaaaaataagctgcctctccccagcttaaaaaatgagccactcctaaaatttactgaggcttctaaattagtaatcgcataactaattcagaagccccaatgaatgagggaggcggcttatggaaaaagctggagacgaggcagattattttttaagccaccaaaagaacttgccctaacacttgtcttgcctcttctgaaaccttttcttctaccattttgataacttgttttcatgtggcagtctgtggcaacttctccgattggtggtgaatttttaactgactgtatgatgaaaagcttggagagcaagggcgttgttgtaagcacctctcttggttaagatagcatactagtccttgctgtattttcatatatcctgtttgttcacttctcagatcaggccccgttattcattcaagaagaaggaagcgagccctggagattataaggtgtagtttctagaacatcacatcagatattgacatccttttcttgtcttcttgtgattccattggaccaagagataactctttacaccattcgatgtgctcctttgttgaaactccttgtaccattgaatgtgagctgagccgttggtatagttgaaatcaacacaccagcaaagaggaggggcagaatatacaatatatctatcatccttgtcttctaacaaaaaaaagtgagagagaacttgcagggtggtctgtaccgctgccccttgccgaattcatttctggcaccaattacgttttaccatgtggaataaatctcttgataggcatcgaatactattttggcgtcgcgtttctaatatcatgaagtaacgccttcctgtaaatatcgatattcacagatacatgcgcactaggtggttctctgactatatatagctcgccctttggaacatctttagtatttttcttcatatttatgtggtactaaggttctgaatttgccgtgataattaaataattaatcatggttacattataattgaactagcattatgccaccaattactgacatgcttacactagacggatatataagggaaactatgtggtgtttattctgtgaacccatttttatcttttcaggttgtagaccttgattttccaaacaccacagagagttacaggttgtaccacatggtatgttcattggcaaatctgtaattcttgttttgctttgttaatttttgtctggatgcctttaatggtgatgtttactctgtatcacagagagctattgctagcgacatcaaggagacggtttgtagagttccagatactcccttcgatggtataacatttcaaaaatacattatttctgtgattgttgagctctgctatattgatgtgcaagcttggtaatactatttccaccatactgacatgtataaaaaaaatctgaggatcaagccagtttcagttgatccattaacgaatcctatcctatatacctaaatagttggtccccactaactccaattctctcaacatgcaactatgccaccattcatgacctaaataattgaccccctactaactccagttctcttaacatgccaaatatgccatctcatcatgccaccatgcatgagaaaagacccacattaaaatgcaccatgcatactaatatgtgataaatattctacaactatagaatatgcaaatataatgataaattatgtgttagtttcaatttagtctaaatacttatgtttcatactaacaaatctcattgaaataatttcaacaaattccagcaacgcgtggggcatcgtctctagttatatatatgcatacaaccatactatagctggctactttttatgcatatcgtctgttaatcaccattatttttattcgcttgactgatttggcatctctttgtatgctttatttaagcattatcttgctttgtgttcctcttttaggttctgctgttcacttttcctgctttattttcatgcagaagtggcatatgcaaatgttccaacaacttcatatgagcttccagatgggcagtaagttatcaatattatatacacatacttctctctagtcagattaatttcattttattgacagttagatttgaatatgggctagtatctacttttctggagtgtatctgatgcatcttgccctcttactccattgtgcatgccctctttagtacgcccaacaaatagtcatgataaacttcgttttttgcaaatcgacctaaaaccaatatgtcataacaccgagaaattgtggtttagaaactacgaagtttcaactagcaaaggaagtctgaaaatagaacggcgaaatagtcactgtttactaggatcttcgcatgtgccacattttagtatagccctgagttgtaatgatgattgttgatttttacatgcccattacaaatatgcatggtactccaatttcggatgcacaatgcacctataaggtgttaggattctgatgtctactttctccgtttctgttactgtaattttgtggtaaatatgttgtttgtggttatactgtttaagaggttataacttatctatgttatatctgagcagaactattgaagttggtgcagagagattcaagattcctgacattttgttcaacccatacctttcacaggtgagtgagaaaagtatattttgttgtgtgcatgtatgttagttggtcaggatttgtggtggttgattactctatccaggaacagaacaagttcattgcttcttcagtagaggctatcaatattcaaataatttcttttgtacggcttgtcatcaaactctctcctgcacactaattttgtgatcaacagactattcctgggatcgatggatttggagattccacttcgattcgtggacttccacgaatggtgagttaaattatgggtgcttatattgttgtgcagcttggacagttcttcatgttaatgaagttgctgccgccattgtttttcaccaggtccttgacagtgtaaataggtgtgatgttgacattcgcaaggagctactcagcagcatcttggtaaagacattagttccagtgctacattgctacttctctctctctctacatgtccccagccccatgcacaggcttagtgaaagaacacttatagcataatctttgattctcctgttatagtttgttaatacaactctaacatctgcaaacttgtattgtggatagctttctggtggctcatcatcaattctgcagttaaaggaccgtctagaaaaagaagtactggaggtaaataaaaaggcagctgaacaagctaggatagatgttgctgtattttatatttgttcaccgtgtccaagcatgtttcattttataatatgaacattcaacctgtaaccactagcatgcacaaaatcatttacacttctcacatgaaaaaaacggtagcaggtttgtcatcaaaagttttcctatattattcctttttatacaatgacatctatttagaaatatagatagtattcctagagttaggcatgtactccctccgctccgaattataagatgttccaacttttttctgaatcggatgtatattgacgagttttagtgtgtttgttcacccatttgagtttgtatgtagtccatattgaaatatcccaaacatgttataatccggaacagaggttgtatttttcgtcttcgaagcttctgttagttcaatgcaataacttatattctttgcatgaactcaaatcatgctttagacaaagcttttcactttatttctgcgaccttcctaaaaaatagaagaataaaatgcatctcattgattattttggttagtgactagttattacaggatagttcataaaaaggagaatctgtggttgaggcttttgagaatggttcctttgtcttatctctgagctattcttatttttaactcaatgatcacaggagtgccctcaaaatgctcgtgtgaaggttttggcaagtggaaactcaatagagaggcgattcaggcaagacctagtatacttgcttgtcttcatatgcattggctatgctcagtgaatcctgttagcagcagaggagcttgaatgattgcttgtgttgccactagaatgtaaaactgttctttttgctgctttaattaaatcagtagcttaacgcaagaacttgtcgtggccatgaaatcagtttaaaattggctgaaagcatactgatcgcaatgccagtagaacttaatccttgaccatagggaagggttagcacagaaaaatgcatggtgtgtggttggttttgtctgtgtggccgctagtactgagattcatcatctgttagatgttgattgacatgactgacatgttataatttgatgagtgcagtgtctggattggagggagcatccttgcatcccttgggtcgttccagcaaatgtggttctccaaagcagagtaagtttgattttctaggttctgtttggttgttctgctcttctgcatcgtacgcctaagaattgtctatctgctcgcaaacaggtacgaagagcacggcgtttcctatatccagaggaaatgcccatgaaatggtggagcatgcatcctgcccaagctttgtgttgccgaaagatgtgtctgagcaacagttagatgcaggtgaccgactatctttaggtccgctagtgcaactctagaaaaaactcagctgatgcttgtacgtgcgtgcaggaagatgtgtgttggtcgccacctttgttacctggggatatttatattgctctcatgactgagttatctttaggtccgcgagggcaacttgataacaagctcagctgatacttgtcattgatggtagatacatgtgatgatttttctcgtctgtgatgtagaatgtgtaacagtttaccctccagacttcagccaatgtatccggaaatgaattctttagccatttacgta

SEQ ID NO: 69 - DNA, 8910 bp, Hordeum vulgare
  source 1..8910: mol_type = genomic DNA
ctactagtggaggtgggagttgacaagtgaggagcagaattgagaatttggagtggagggttgccgaacaggcccagcgtcaccgccgacgcctcgaccccgcagccccgctcctgctcgccgagccctccctctccggatctccagccatgtacggcggcggtaaggctcgcccctgcccctgcccctgctgaaccctaaaccccggagatctcccgccccgaccgctcacttatgctctgctctctcacccgcagacgaggtctcggcgatcgtcatcgacgtgggctcctacagctgcaaggcgggctacgctggcgacgacacccccaaatgcgtcttcccctcggtgagcttctgcttctaattggtcggattttctgtttcttccgagtgcctcgttgtgaccaggctgttttagttcgtccactgagccgggagtgctaaatccgcgtgcactgcagccgtgggagtttgggtgcttcaaaatttccaagttttcgagctatttttaagtcaaacggcttcggattctggttcgaacgtggtggtgctagcgtatcagttcatgctatacgggccaaaccataaactttgtaacaggcacgcacgtcctactctgcaaataatagctacattaatacgaagtcggattcaggcattgaacctgcagactgtgataagatgcacttacctgtcggttccagcagcgggtgcaatcttttttatctattggcaagaaagttagttcatgattcaggcttttctaatggcccagatttgccagtgttatctagtgtgagccttttttttttttgaaagatccagctgctggctggcttgtattgatttatagcagatagcaaatgggaatacaaaaggtggtttttgatcagaggatcaaggaattaaaaagaagactaaaaagaagatacaacatcttcgttaagtaatattttcacggagggtccccaaaggggtgctccagaaaaactgctcctgcttggcgccaaaactcaagagttcttttgatggatgtgttgatgtttgtcagtgccactaccttgtttttgaaagtacattcatttctctccctccaaagctcggatagaattaggatgatcatggttttgatggcctttttgtgttcaggtcttgcagtagttatcattttagctatgatggctgctggcttggtcttgctttgccacttgcttgggtggagggagctacaactgaatttcaagtgttgaaagtttctgcattgtgacttgtgctgttagttcaggaggttaactgtagatctcatgggaacttgggaaatggtactgttgtgtttgaaatgtgaagttcagtttataaacaagttgttgacttggagattattttctgccccccttagactctacagttaatgttttatttttgttgtgtgaagatttccctctgcaattagtgggattattgggctaatttttgcagagtggcagtaaattgttagtttcactctgttaccgatgacataagcaaactattcatgtaatgacattcagagaaaatgagaagtactgtgtaattagcactaagaaaatggttcgaatttggccacttaatgccattgtttgggtttagcacgttttcttcttctttgcctgaacagtgcttggaatttttgtaattttgttggttcaagggtatgtgagctacctaattggatgttttggccagtacaacttattgcactcagtatctggttttgatatgttgaggttgttggttcaattgaacaaacgggagatgctgatgaagctaaaccagaaaaggaggccgactctggatcagatcctaagaatggatccaagcctatggatgtggacaaagccaagacaaagcgcaaattttatctaggccaagaattagaattcaggagggatcatatggaggtttgtaactgcacattctgaggatgatttgttgctcatgcattttattaactattgcttattggttctctccccctccccactaaacaggtgatctcaccgatgaaagatggaacagttactgattgggaagttgttgacaacatatggaatcatgcttttaggtaaatttatttacctacttgatgcagctatgagcaatttctcctctttaacatggctcatcaataatcagcaatgacaccatttggactacaattaagtcactagtttaagcttaacaagttagcattctgtgtttatttgctatcaagtgtactgattgtgaaattctttagcattctgtattttcccttttgttttatttaatttgttgagatgctttgacttctataacaggtaaggttgattaagtacaaggatttcctcgttacgatgctatgtaatttgctggagttgctattgctttgttctattgtattgtcacactcacttattctgtatttcagacggcggctattgatcaatcctgaagagcatcctatgctgatagcagaaccttctacaaacagtggacaacaaagagagaagtatgtgtatatgttctgtgtttagaacatttatatcgctaactcatatgagtgcattcaagaccgactcttttgactcttattttccatgttctatagagcagcagaagttatgtttgagaagtacaaagtgccagcgctgttcctagcaaaaaatgcagtatgtctctcagaagtaatccttgatgcaatcggtttactatttttaattgttgatttggttgtcaggttctcacatcttttgcatctggacgtgctacgtctctggtggttgactggtcagcattttctttacgccttttatccctgcaacctgctattttccttgtagataaatgaaggtccctttttgctacgttagcacgactagtttgtgaacaagtgcactgtgttctgatgcctgcctggttctcaatctcatactttatatctgaaatatattgttttttaccaatatatgttgcacgtagcacacatatattgtggagcaacccatccatgagaagaaaatgctgatgaagaagttggttctaactgttaatgcttaagattccattcgctgtgcttgatgtgaacaccttaatctggtttcgtgcttagatgaccttcttgaatacttaagcattttataagctgtgtattagaattcaacaagctggtgttgaacatctaccaacgatttatttcatcctcgtttcactgctttgggtctttatcatgagagcaattgctgcattatgacagtgtgttcatttctggtgcagtggtggcgggtctactgtggtttctgctgtgcatgatggttatgtgttgcaaaaggtatgttatgatattgataactgattttcaaagggaggtgtacactacattacttgcctgtatctaatagtgatttacctgtttttactttgtaaatttcatttgaaagtgtgattaatccaaacttcgctttataatttaataaaataagatatcaagttgtatcatatggaccctggcatatgtaacactgacaccacttttggcttgtctcttctgaagccttttcttctactacctccgtaactaaatataagacattttcttaaggaaaacgcttaccatcatccggtggatcacagcagccgcgtccgccaccttctcagcatgacatgcgttcacgaacgcgcttctgcaacgggagctatgcttctgaaacatatgcagtgttgcaatgatctacaacggatattgtgcaacaaatttcttttacgtaaattttctgcaacaagacctttgttgcaaaaaaaatttgcaacaaaacctcagttgcaatatttttttgcgataaaatagttgttgcaaaaaaattccgcaacaaaagacctgtgttacgccacaccaatacctgtgttgcaatggtagaggtgcactcggccgcttgatgcggcagatccgacggctcgtgaccaaactgatcttttaaaaagatcagccgacggacgcatagcatgccccatttcttaattgaactgcaaaaacttcttatatttagtttcagaggtagtatcattttgctcacacttgttttcatgtggcagtctgtggcaacttctccaattggtggtgaatttttaactgattgtatgatgaaaagcttggagagcaagggcgttgttgtaagcatctctctttgttaagacagcatactagtccttgctgtattttcatatcctgtttgttcacttctcagattaggcccaagtattcatttaagaagaaggaagtgagccctggagattataaggtgtaatttctataacattacacttgatatcaaaatcttcttcttgtttgcttgtgattccttgggaccaagagataactctttataccattcgatgtgcccctttgttgaaactccttgtaccattgaatgtgagctgagccgttggtatatttgaaactaacacaccagtaaagagaagaggggcaaaatatacaatatatttatcttaccatgtaaaaacgtcacaggctgatatctgatctctaggaaatccatgtctaacaaaaaacatgagagagcctgcataggtctgtagatagaaattgaatactccctccgtcccaaaattattgtcttagctttatctagatatgaatgtatctagtcacgttttagtatttagatacgtccatttctagacaaacctaagacaagaattttgggactgagggagtaccattttggcatttccaatatcatgaagtaacactgtcctgttcatatcagttttcatagatacatgagcacggtggttctctgactaatatctagctggcccttcaaatttatgtagtatctttcttcctatttgtgcggtctacctaaggttctgaatcttttgtgttaattaactaatcaatcatggttacattctaaattaattagcattatgctactgataactggcatgtttataaagacgaaaacctgaaacatcacactagatggatataagggaaactatgcggtgttttattctgtgaacccatgtttgtcttttcaggttgtagatcttgattttccgaacacgaccgagagttacaggttatactgcatggtatgttcattggcaaatccgtaattcttgttttactttgttgaattttgtctgtatgcctttaatggtaatgcttactccgtatcacagagagccatcgctggcgacatcaaagagtcagtttgcagagttccagataccccctttgatggtataacatttaaaaaatacattatttctgtgattgtttagctctgctattagaacacgcaagcttggatgatactgtttccactatatgccagatcagttgatccattaatgaatcctatatatgcatgcgaccataatatactccctcggttcctaaatacaagtctttttagagattccactacggactatatacggagcaaaatgagtgaatctacactctaaagtatgtctatatacatccgtatgtagtccgtagtggaatctctaaaaagacttatatttaggaatgggggagtagttggctactttatatgcatattgtctgtctgtcaccattatttttgatcttttattcgtttgactgatttgacacatctgtttgtgtgctttaagcactatcttgctttgtgttcctcttttaggttctgccatttactttccctgctttttttcatgcagaagtggcatatgcaaatgttcctacaacttcatatgagcttccagatgggcagtaagttatcaatattatgtatacttgtttacggtcagattagttctattttattgccaactatattaagaatatggcctactagcactttctggattgtatctgatgcatcgtgcactcttactccattgtgcatggctcttcacttcttcagtacaccccacaaatggacatgacaaatttcgttgtttacaaattgacataaaaccaatatatcatactattgaaaaattgcagtttgacgaccttaaagtttcaactcaaattctgatgaaaaccacagtttactcggatatgctcatgtgcagtggagcctcgagttgtaattttgcagcctggtacaccatatcatgattcagctactacattgattgtatacttttttcattcccattaaaaaatagacatggtatttcgattttggatgcataatacacctaaaaggtgcctggggttctgacatctccccttttttctgtttctgttgctgtaattttgttgttaatatgttgtttgtgcttgtattgtttaagatcttataacttatctatgttatatctgagcagaactattgaagttggtgcagatagatttaagatccctgacattttgttcaacccatatctttcccaggtgagtgaaaaaagcataatttgctgtgtcgtgtgtgcatgtatgttaattggtcaggatttgtgctagtggtggattacactatccaggagcagaacaagttcattgttttcttcttcaatagatgctattttattcaaaaaaatcttttgacttgtcttcactctctcacgaataacttctgatcaacagactattcctggagtcgatggatttggagattccacttcaattcgtggacttccacgaatggtgagttaagttatgggtgctatactattgtgcagcttggatggttctttatgttaatgaagttgctgccaccattgttgttcgtcaggtccttgacagtataaacagatgtgatgttgatattcgcaaggaactactcagcaacatcttggtaaagacattatccagtgctgcactctgctacttctccctacttgttcccatgcacaggcttagtaaatgaacatgtataacataatctctagttctcctgttatgttctgtttatataactctgacatctgcaaacttgtattctggatagctttctggtggctcgtcatcaattctgcagttaaaggagcgcctagaaaaagaagtactggaggtaaaaaaaactgaacaagctaggatgaatgtcacctttatatattttcaccgtctccacatatatttcattttagaatatgagcattcaaccttcaaccactagcatacacaaaagcatttagacttctcgcgtagaaatgatagcaggtttgtcatcaaaagtttttctacattatttttctttctataatgacataaatttagatatatagaggtagtggcattagagttaggcatgtattttttttttttgaagctttgcttattattaatccaatttcaataaattatttgctttgtatgaactcaatgcatgctttagacaagctttccaccttatttctgcgaacttcctcggagatagaagactaaaatgtatctcgttgattattttgttagtgaccagtgattacagtggttacaatggttccttagtcttgattttgttagtgactattaataacgactccttagtctcgattttgctggttagtgaataacgattgcaatgtagtgactaaagtctaaagctgcttataatgttccctgaatctctgcagggcttattcttatttttttaactcattgattgcaggagtcccctcaaaatgctcgcataaaggttttggcaagtggaagttcaatggagaggcgtttcaggttagactgctatatttgccagttaagcaaaaataataattgcgacatgggtctatgcgaacctgattaagcaacaaattaaatagtaaaatgacatttttgcgacaaacatagtctagcataatattcacgttcaaagtttcgggacaaaatgagttatgtcgtattctgagtgaaaaagaacaagagtgcagctacaaaggccgtgaatactgaatagtagctgattctgttgtattttgctcagagtacggcatttattgttttctcccgaaactttaactgtgtgtactatgctagatcatgtatgttgctaaaaagcttaaaaaatatttgactatttctactattttgtttttcaatttgggtgcgcgcgcacccaggttcaccgatgtattttcgagcaccggctatattcaatggaccccgttagaagcagagcagtttgaatgattgtgtgtgtcattgtggttgccactagaaagtaaaactgtatttgctgcattaattaatccaagtagcttaccgcatattgtcgtggccctgagattggcatcgtcatgccactacaacttattggggccatagggaagggccaccggtgtgaatgggtgtgagggaggccggttctgtgtgggcaagattcatcttttagatagatattcattgacaaggctgatatgtatttgtaatttgagtgcagtgtttggattggagggagcattcttgcatctctcgggtcgttccagcaaatgtggttctccaaagcagagtaagtttgggtagatattttaggttctgtttgcactgctcgccgccgctgacacctaacaatatctgcatatatatgtatctcgcaaacaggtacgaggagcatggcgtttcttatatccagaggaaatgcccatgaacatctaagcttttctgctgccgaaagatgtagtatgtgggcaactgcaacatgctgcctgagctaagctttgtgctgccgaaagatgcagtatgtgggcaacagttagatgcaccttgctatctggggatgtttattcttgtaattgactaaattagttttgaggcctgctcatcttgtgattgactaaattagttttgaggcctgctcagtgccagctcaactgatactttgccattgatagtagatagtagcaattattcatgtgctgatttttaaa

SEQ ID NO: 70 - DNA, 12173 bp, Hordeum vulgare
  source 1..12173: mol_type = genomic DNA
cgcaatcatcccgcacgcccccacgccacgccacgccacaccgtcaccgcccgcaccaacccgagaaagaacaacactggaggacaccggcagcatcagcaacccgctctccacccccgacaatcccaaagccaagcaaagcaacaccaaacccaaagcacaagcacaagcacaagcacaagctaatctcgctccaggttccactctccaccacgattcctcgattatctcccttcttctccaagcttctagtcccctctcgcgctctcgactccgcaccaaccagcccaagctcggccccttcggtggcggttactaccactagtgccggtcggtggtgggatgcccgccgctgcgacggtggctgccgcccgctaccgtttcctcccgtcgccgactttcctctcgccaggcgcaacccggtggtgccgccggtgacctcatctccgcccctgcaccacgatggaccccacctcacgccccgccgtcgtcatcgacaatggcaccgggtacgcatctctgtccttcacgcttaccagatctgcgcgtgggtcgaacgcgcgatgctgatccaagtaaccgtggcagctacaccaagatgggattcgcggggaacgtagagccctgcttcatcacccccaccgccgtcgccgtcaacgagtccttctccgaccagacgcgggccaccgccaaggggaactggctggcgcagcacagcgctggcgtcatggccgatctcgacttcctcataggggaggaggctttagcccggtcacgttccagcagcacatacagcttgagctaccccattcgcaacggccaggtgggtgccgaatgttgatgttatgttttgaactctcatgtgcgtgcgtgatcttcgttaacttgggctgaaaattaactgctcaggttgacaactgggacaccatggagaagttctggcagcagtgcattttcaattacctcaggtgtgacccagaagatcactatttcctgctgaccgagagcccactgactcctcctgaaacccgggagtacaccggggagatcatgtttgagacgttcaatgtgcctggtctgtacatagcggttcaacccgtccttgccctagccgcaggatacacaacaaccaaggttagtcgtcagagttttctcttgtggttattgattgagcttttaggatttcccgagcctggactctgaaactggccattcagtatacttttactgttgtattgcacatttccgacgagcaagatttacagtggttcccttttcgattacctcgtttgttctgttctgtcaatgtagaatactctaggttatgctatgtgatctcttgtcttggacattcaacatgtattgtgtcctggggaagactgagtaccactaagacttcttttcatattagatttgttacgaaaatgctattaagtggtgcttttccagtatcactactcccaaatttcagctacgtactatagtttagtattgagcatctgaaaattaattatcttctgctcatgccttgttcgagttacaaatagatacttaaaccaggatttgtaccttcatggaattgtaggttatatgctgtagaaccataaggtccacaattacaaaatgtaatgttaaactcactagtgtggggcatgtgagccattggaccttcccgattagacggcttgcaaggacttaaatccgtgacaacattttatttagaaaaggagggtatatacccccggcctctgcatctgggcgatgcatgcagccattttattaattattcacaatgaccttacaaagtataatacatcagtaagtctgaagccactatcttcgcaacacctgtcgctcctatccccttgatgaaggggtgccgaatgaccgagcctaataccaaacagacatcacaccaaagcctaacatctaaagccagttgccctagcccagccacaataccgggactaggtcacaccggtctggcgcactctcagaggccgccgccgccgtcttccactgatccatctccagagcaggtactgacgcaccgaccctgccagggccgccttcgacgccaccacggcggcaaacaacgccaccatcctgcatgtatccatccacacgcgcctgtcgctgaaactccacagcaccatgccgccgggatccgttgtcggccttgcggtagatgtagcaccgctcctcctcttgtcccctccagccagctcctgctccaaaacgatgcccccaggagggagaacgacactgaaggcgccgtcatcgtccgatccggtagacccagagctagggttttccccggaacatcccgatcatgttgacgcaacttgcaacgacgatgcctcaataggggaatgacgtcggagaagccgtcatcttccgctatgacggaagtcggcgcgatttttatcggaagtagtgccaccatgatctcgccgttgattggctccgagatcaccctcgccatttagacgcacggtgtcgtcagaaagccggttgaggacctctggccgccccagccctatcacgcgccgtcggccggcaaaagccgaaccacgaccagatccatgaccgcctccgccgccatcgcatagcagaggatcccaccggagcacctcaccagccatgggttcgccggctgccgccgtggctgccgcgcgacggcgcgaggacatcctgcacgtggcgccccggccgcctcatgggagatccggcgcaaccctcctgccctagcccttttggcgtcgggggccgccaccaccgcggccagtgactgcagcagcggcggcagggatctacctcgcgggagggccggtggcgtgaaggagctgatccccttggcgtcgccctgggtggcggcgtgagggagtttttttctatcaaagaacgagcaaaatgcagtgtagataccactggacctggtaatctgatggtccatgccccaggggttccggtgggtctcatccgtacactatcctcctattgcgttgtgtcacagtgtcacagtgttctctactgcgttgtgtcacagtgtcagatggcagtctagaaaggatttgagcaatctgaaccttctggggccatgggctactgctgtaaggaagtttaataaattcaacaaggtatcgccccaagagaaattccaaaggaaattttcagcacacgataaattagaagttgataaataaaaagtgaaaaatcgaccaaattagaggtctgctacgcagccagacatggtatccttcattattttcacgcacattctgcttgttattgatatagaaaggggctataacatttgaaaaggcaaaatggaccccaggctacatggagccttttctcgaaaattttgaaaagtataattttgagactacaaaaaaaaccctgaaatcttttgtacatgtacttatagtctatagatatatagtatttgtgtacatttgttcgacaatatgtatttcatctgtggtgtcataaataagataaatatgttgataaaaaatgaagttaccttttgctgtttatggagacacatttttctgtgtagcctataaatcaacatataattttacatatacgtagaaaacatctatatgtaatgttattttttttatacttctaaatatacttttagttttttttaaatagcgagcaccatggtgctcgaaagcctaattgccgctcctttattttattacagcaagttagtcggtgggtttgcttcggagtaagatggtattgctgttcactgtaccatcattagttagactttgagaacccggcagatgaactcatagatccactcctagttctgcactacttgcaaatagaagatgtccatctgcggagttgactgctaggctagttgttacttcagcaattaagtactgagttggaatcggaagaggatcaaatggactgatctagttggatgggaattacataagggattagagatgatatgttagtgttctgctagccatgcacctcgatttggtttaggatcaagaaatattgggtgtttttgctttatactccctccgttcctaaatataagtctttctagaggttcaactagtggactacatacggatgtatatagacatattttagaatatagattcattcattttgctccgtatgtagacatctagtgaaatatcttaaaagacttatatttaggtacggagggagtagtaagtactaactgtctcacaatagcagtccttcatgcagctttgttttgatcatattttccctcatcatgtgtaatctattttgcttttagatccccaaacttttggtaaggtagagaatacacctatcacctaaaactaaacctgcatccatattaaacctggtccagtgcatgcttccattcaaatgacagtgcttgctaccatttctaccaccctactttccttgagcctggcatattaagtgcgttagaatccaacacaaattggttgttgagcttgccaacattgacttgaaatgttaaacatgatgcactcgtattcgttccacatggtcatgtatcagttgcgtctacatcagtagcttactagatgtttgcaaatccccctctctctcccttccatccagcgtggtgtaatctaacacatgggaatcatgcattcctgattcacagaatatttgcatattttgttgctccatccacttgcagtttgtgctacattcttgaatcttgactattattttcttacttcccctgttaagctaccatcagactggatatttattgtgcaacttcatgctgtgttttcagtgtgaaatgacaggtgttgtggttgatgtgggtgacggagctacccacattgttcctgttgctgatgggtatgtcattgggaacagtatcagttctatcccacttacaggcaaggatgttacccagtttattcagcaacttatgaaggtagtttccacagtcagaagatagtacttaacttcttattttattagcgtcagaaggaagtgataaaatagttatgaataatgttctcaatcatgcgcattgagacaacgacatactgaaactcatgtttatcctcaccttgtgagtaaggaaaacagatcacctatatgaaggacatgcataattttcttatttagcttcaaataatcatatagagaaatagactgcatgaccacgctgtactaagttatcgaacttccaattcttgaatgcaggaaagaggtgaacacattccacccgaagaatcttttgatgtagcaaggagggcgaaggaaatgtactgctatacatgttcggatattgtgaaggtattaagtacatctggcgtttactatgttgcttgttgttgttgaacatctatagactatctgttattctgttttccagaaaaaatatgtctctatagaaaagaagtttcctcttttgttctcagctgaacaaggtttttgtaagcaaaacagttagcaacctgtaccagtacagcagatagcactcaggcttatgcattggcatattaacaccttgctggcaggacttaatagtgtaaactccctgctcttaagatgttttgctgaatatttttcctcttcaacattttctgccattgctgattgttaaattgtcatctttttctagtctgctttaaatcattttttgagcaagaaacaatccaaaaagaacaatattcatattacatcttcgtttttcttttgtttcaggaatttaataagcatgacagggagccctctaagtatataaaacgattgactggcatcaaaccaaaaacgggtgctccatacacctgtgacataggatacgagcgcttcctgggccctgaggttagtacactgatgtgttctgtagttacttctgtgttgtcatgtcttatttaggctcgtcttttacacatctataaaaccggcatcacgcggactcctcatcagcaaaaaacactttgaaatttagggtttgttttggatcgctttaagttggtgaacatgaggcaaagttcaggatagttacacttctaatcttttctacttataaagattggagttggtggtgagtccagatatggctccaacatcctttccaaataaacaattgcacacatcccagatatggaactagcaggggcgtacccaggtagagctaccaggggtcactggacaccgggtaaaaaattatgtatttggtatacttcatgtatgtgtagggtagttacacttctaatcttttctacttataaagattggagttggtggtgagtccagatatggctccaacatcctttccaaataaacaattgcacacatcccagatgtggaactagcaggggcgtacccaggtagagctaccaggggtcactggacaccgggtaaaaaattatgtatttggtatacttcatgtatgcgtagtgtgtgacacccccaaattaaagcaaatgatgtgtattatttatgtgaggacaccggctcaatttctttctaagtccgcccctgggaactagcaaccttccaagagacatataaagaaatgtactttactcacatgtggaatctatcataaataagcaaatacactactttcatgtgagaccaacttttttgtaaaaggcacaaataacaaagacaaaaatgtgacttcaactaaaaaccgatcttggttttagttctcttcccaacctaccatggtcatttaaaatttcttgacgctgcatgtctctcacaaagatggcaaagaaggctgctaagcgagctgtgagtgaagcaaggggtcgggcgtatgaggacctctatcagcggttagacacgagggaaggagaaagggacatctataagacggccaagattcgagggaggaagacgagggatgttgaccaaatcaaatgtatcaaggatggagcagatcaactcctggtggagaacgaggagatcaagcacatatggcaggagtactttgacaagctgttgaatggggagagtgagagctctaccattgaactggacgactcctttgatgatactagcaggcactttgtgcggcgtatccaggagtcggaggtcaaggaggctttaagaaggatgaaaggaggcaaggcgatgggccccgattgtatccccattgaggtatggagaggcctcggggacatagcgctagtatggctaaccaagcttttcaacctcatatttcgggaaaacaagattccagaagaatggagtatattagtaccaatcttcaagaacaaaggggatgttcaaagttgtactaattactgtggaattaaccgatgagtcatacaatgaagctatgttagagagtcattgagcaccgcctaagaagaatgacaagcgtgaccaaaaatgagtttggtttcatgcctgggaggtcgaccatggaagccattttcttggtacgacaacttatggagagatacagggagcaaaagaaggacctgcatatggtgttcattgatttggcgaaggcctatgataagataccgcggaatgtcatgtggtgggccttggagacacacaaagtcccagcaaagtacattaccctcatcaaggaatgtacgaaaatgttgtgacaagtgttcgaaaaagtgatggtgatagcgatgacttcccgattaaaataggattgcaccaggggtcggctttgagcccttatctttttgccttggtgatggatgaggtcacaagggatatacaaggaggtatcccatggtgtatgctctttgcggacgatgtggtgctagtcgatgataatcagacgggggtcaacaggaggttagagctgtggagacaaaccttggaattgaaaggttttagacttagtagaactaaatcgagtacatgaagcgcggtttcagtactactaggcatgaggaggaggaggaggaggaggaggttagcctggatgggcaggtggtgcctcagaaggacacctatcgttatttgggatcaatgctgcagaaggatgggaatatcgatgaagatgtgaaccatcgaattaaagccggatggatgaagtggcgccaagcttctggcattctctgtgacaagagagtgccacaaaatctaaaaggcaagttctataggacagtggttcgacccgcaatgttgtatggcgttgagtgttggccgactaaaaggcgacatgtgcaacagttaggtgtggcagagatgcgcatgttgagatggatgtgtggccacacaaggaaggaccgagtccggaatgatgacatacgtgatagagttagggtagcgccgatagatgagaagcttgtccaacatcgtcggagatggtttgggcatatttagcgcaggcctccagaagctccaatgcatagcggacggctaaaacatgctgataacctcagaagaggtcgcaatagaccgagtctgacatgggaggagtccttaaagagagatttgaaggactggagtatcaccagagaactagccatggacaggggtgcgtggaagcttactatccatatgccataaccatgagctggtcgcgagatcttatgggtttcacctctagcctaccccaacttgtttgggactaaaggctttatttgttgttgttgttgcatgtctctcaccgtatttttgctatcttttctaattgtaaatcacgcaatggtcatagagaacactaatgttatttcaccacctctaacccaatggtttcgtggcaacgcacaggcatcatgctagtaatagtaaaaaataaaacttgacatcacagatagtaaaatgcagtcttatttgatttgaaaccctttctagtttcgatgcatatgttgcagacaatacgtttgggaggattttgaaacttcttcgcgatatgtttcaatttcaaagctcgttttagatcgattttctcagagtgctgcctaatatctgtagtttcaggaggatcttgaaattcgcttgcgatatgtttcaatttcaaagcttgttttatttcaattttctcagagtgttgcataatgtctgtagatattcttccaccccgagatttacaacaatgactttaccactcctttgcaagatgttatagacaagtgcatccaatcatccccaattgatacaaggagggctctttataaggtttgtgcatgaaaatcttgttttcgctgacattacagtattttgagtgtgctgtcaatgtcacagaatattgtcttgtctggggggtcaactatgtttaaggatttccacagaagattacagcgggacctgaaaaagattgtggatgtacgggtccgtgcatctaatgctcggcttggtggagatgccaaggtataaactttccttgtttgctcttttcctctttctggcagcagaaagcaatgactttgtttgtacttccggaacttgaaaattcagctaaattaaatggtttcaggctcaacccgtggaagtaaatgtggttagtcatccaattcaaagatatgcggtttggtttggtggatcggtgcttgcatctacagcagaattctacgaggtattcaaattttgtctccctacagcagtaagaaaacacgtgtctttactacttataaagattgaagttggtggtgactggtgagttcacatatgggtccagcatcctttccaaataaacaaatacacgcatccccacatgtggaacaagcaaccttccaagagacatgtaaagaaatgtactttactcgcatgtgggatctatcataaataaacaaatacactattttcatatgaaaccaactttttttaaaatgtacaaatgacaaagacaaaaatgtgaaaattgatcttggttttagttctctacccaacctactatggtcatttaaaattctctgatgctgcatgtctctcaccgtatttttgtatcttttctaatcgtaaatcatgcaacggtcataaaggacactaacgttatttcaacacctccaagccaatggttctggggcaacgcacgggcatcgtactagtcacctgaaatttgttaatgtgtttcgagttttgcttcggtccccacaaaaaggaaaatagaagagttttacttcaaaatggtactacctttgtaaacaaatgtaagacgatttacgtcactgttttagtgatctaaaccgtcttatatttgttttcagagggagtacttttgtgctgaagtgatcaagagattagatggaaaatcaggtcaaatgcaccgggagctaggcccatagtacaaactcgaatgtccaacaacaaacaccgtcttcatctgcatcatctgaaaatacttcctccgtcagtttcgtacgatggcgttgtttgaggaagtgacaactctttgaagcattgtgatcctgatccgtgatatcgtgccatgccccatctgtaacgtaattaaggccaatccgtggaaatcaaacacatacatgagctcccagtaaatcacaacagctacctgcgctgtgctggaagtcacatcgccatctctacacaaccataccctctgcgtcaagccaccgttcatagattgcatctcaccgccgaaagcaagcacgtaggaacgggaggtcggccgatatccgccactgttgcagagccaaaactccacatacggaaccatgtggcagccccttgccatccacgttcaaggcagccggcggcggatcaggttcatcgccgcaatctatccggctcgagtcaccggccaccagaaaaggccctgcataaatttgcgctggccatgcccagtggctaccgcggctgcacaaatagcgccacttctccgtgtcacttgcgccgttcctttgagtctgaggatgagcccctgcatatagttgcgctggccatgcccggcagccaccactgctgcacaaatagcgccgccacatctgcgtgtcactcatgccgtttctttgagtctgtggatggattcccatgcagtactctgtttacgacgaggttccctttgtggtggctgcaacggccttgatgtgctgctttcttgtgccatgactcatcgtcgttaatgtactccggaacgccacatccatcgacctgaccgaggatgacagcagagccccaccaccgccgtcggccacgtggggttttcccaatggcatcctccggtgacggcgaggggaggagaacaaagatgggagggctcctaggggaggaagcggtcgcacccatgtcgcggtttgattttgtgagggctggccacaattaagtacagtactccatccgtctcagttttagttctagattgacaatttaactaattaaatatgtatcatatgtgatgaaaaatatatgtttagaaactacatccacttaagaatctaatgacataatttttgtgacatataatgtatatttaattagtcaaatcaataacttagaactacgcgcatgccctgtaaactgagacggagggagtagattatactacccttgcaattaaaaacgggcaaattttaatctccactaacgccggtatgttggagcatgtagttttgaaagtggattatactgaagcatctttactgtgatttgttttaacttgcattgtcagtatctgatctaagctaaccgtcattattttttttgtccaacaggcttgccacacaaaagcagagtatgaagagtacggtgcaagcatctgccgatcgaatcccgttttcaaagggatgtactgagatttgcgcatgaaagactagcgtcacagatagcatatccatgcaatcagcctgatgagcctagctagcagtagcaggctggcagcatggtaaaactgacaccggaggcaggctctctataccgtttgtttgtacacaaccagcgtgcatatagagataaacaacatttcgtcaatatatcttttgtatactatacatctgtagatgtagaatggtgctggtagtgtagcaaacaggaggattcgtgaccggatggcgctggcggtgccttagcggcacatgctagctgttgtatttttctttagaaaaggtgctagctgttgtataatctttagtacgagtggagtggagtatcgccggaaactgaacagctttttgtgggtgggctggtgtggctcgtattttcccgtgaagttgttgccaccggttttctagatagtggaagatttcagttgacatcgtaaa

SEQ ID NO: 71 - DNA, 10122 bp, Hordeum vulgare
  source 1..10122: mol_type = genomic DNA
gtgctgtggtttggttcgatccacgatctgagcaagtgcggaccaactgaacccaacagacaacctactacgctagtgcgcctccatctccgagactccgaccacgccacggcaaccgaggctccccctcccctgcaagtgctcccttccttcccgcttccctcgtcaaccaaatcaagcacgcccctcctcccacttccccaatctcccgagccttctttctcctcgccaatcgcgtcccaaaccccccacccaccctgcggggatcgatccccctgccgaccgactgcgcagcggcagccgcggccgcgtccgcgccttcctccccgccgattcagccgaccgatcgcggcagccctcgaccacccatgcttctccgggcggctgcggacgagatatgagccggcggggaatcgccggagccgctcacgccgcccgccatggacccctccgagcgccccgccgtcgtgttcgacaacggcacagggtacagctccgaatctccccgtccgatcctgcgactgcgcagtagctaggtttttttttccttacgtttgtgcgggtccctgagtgcgtatgcgtgcccgtgtgttcccgctgaccgcgctgggaggtgaactggggcaggtcggatcggattaccgactgccgtggaaataaatgcatttcgttagccaatgggacatggatcaccaccaacgactgccgtgaggcttgctccctaattgcgagccaacattcacattggtagctagagcgttctagagtatgttgaacctgaacctgaaatgacacgaatttctatgcgtgtttgattttttttttctacagtagaatggactttccatggcttatctttatttcatcattggttgaactaggtgttggcccattcatttttggtttgtctttaaatccacgctgccagcggtaaggcaatatctgtctggttaatggttggagctaccaacggaaaatctagggactgctactttttcgggattatagctaatagtggtgttcaagtgctttagctcaaatttatcgttactgttacactgtagactattacgaagtactataacatgtcttaactgatgcactatgtgtgttccgtgaaacataaaaacgacaatcgctaacagactgcgatagaagacaggaaattactgtttttctcttgaagccggattgttttggtttcttcaaagccgcttgaaaatttccatatgcatgtcacttgtaaaatttgctctattagctcatcacaccgtgtccttacataatctgtatgctctcatgtttaggtatagcaaacttgggtttgctggtaactccgagccgtctttcaccatccctactgtagtagctgtgaatgaatctttcttggaccaatcagagcagtgcagtagtgcaaattggttagcacagtataatgcaggtgtcatggctgatcttgatttttttatcggggacgaggctctgtcacatttcaaatctagtggcctgtacagtttaagaagcccaattcgccatggtcaggtatgcatatatattttctgtttgtaatattgtccttcggggtgcaccatgccactatgtcatgtccttttccctgctctccaggtgaatgactgggatacaatggagagattttggcagcaatccattttcaattatctacgctgcaatcctgaggaacactacttcctacttacagatagtcctgtcagtacgcctgaaagtcgtgaatgtatgggagaaattatgtttgagacctttaatgtccctggtctatatatttctgtgcaatctgtgctcagcctttctgctggatttgcatatctgaaaaccctttctgaagatgattcagattctgtggtaggtcttgaattcacctcctttcatgcttttgtttgatgaagtgtcaagatgcttattaacccatgaacttcatctctttcactggaacacatcgccttgtgaatgttttaacagataaccaaaattctcatattgatctcatacccacattaagataaactcccttttacattttacagattgttcttcggaatagttcccctgcatatttcgacaaaattttggtccatctttggattatattacccattcatatcctatttattgcttgccagcccctggagttttcattccagtttggagatatgttttgctattccctactcataagcatggaccctgaagcattttgagcgtatcacaacctcatgatatgaaggaaaccatttcgtgagaattatgtgatgactcttatttctcactcgccaattctgcaatgagcgccaattaacttgctaactaaaatttatttttatcgagaattgtgcttgtgaagctctgtaaagattattttgttctagacataaatagtactccctccgttcctaaatataagtcttttaagagttttcattatgaaactacatacggatgtatatagacatacattagagtgtagattcatttatcttgctccgtatgtagtcaaatagtgaaatctctagaaagacttatatttaggaacggagggagtaccatagaagacgcatgctgcatgcagccacgaaacatcaaacttaatgctcatttaaactctaggagtaatcatcattgataaagtagactcatctaaagatcaagtgttctggtagcatacaactcttctcgtgagtttgaccaatatattttgtcagtctgatatgacaggtgtagtagttgacattggggatggagctccacatatcgtgccagttgtaaacggctatgtaattgggagtagcataaagtcttttcctctttccggaagtgatgtaactcagtttgttatgcagctcttacaggtatttaattttcttcccacattttcctggggttacgttagggtgtcgacgtccatgtgttgtccatgaataggttctgtatccggcacttgcatattgcaaatacattaatagaagcaagtctgtgcagtaccgactaaaccagaacaattgaatagcaattttcctgaagtttgggtggcacggaattatccacgaaaaaggaaatgtgttagcagtaacaagagaccatcatatatttgttaggtacttcagcaaatatttgttatgttagaatatttatctggatagctcaattatagtaataatcggataacactgcaattcggtcaacaaagccaaaatgatgcttcagccaaatagtttctactttcatagatatctattctgaagcctcctggtaagtgatcatgttaatatgtgaaccctagatctgttgtgcgttattgcttggtatcctgacattagttttgcactgctcagtatggttgcatgattaatcaacttggagagtttgcatttcttttgtacggatacctaaggttccagtctcccccatattatacccacagaccatatatcatccacaagaagttgattctgtgaacatgttctctgatgaaatatggcaattttttatctggatcacacaaatctagaaaacaaaacctgcactagcattcacaagtgttgctgttatcggctttgagtcgtatgtgcagcggctttatacggacccagcaacaataatagacttatacttgcataaatgtagaacgagttgaaatgtccatggtggatgctatttgtcctttaaattaagtggaatccaattaagttagaaagacagtttggtcaagagtttctgttgtgatccgatttgtggatcaagttagttgttttatataaatgactagcatttacctgtttttagacaacaaatcaatgaacggaaattcaaataaacctcagagtttctcttccacatcaggatgaggcgatgagccctgctgccggacagtagaggaccctctcgtcgatcttcagaccttgactatacccaaattatctcattgtggatcaatgtccataacagctgccataatgtttgggtggcctcttaacctcagttgtaactttagattgaatgaaaatatgtaatttaaaatgaaaaaacggaatgttgtcatctgggtgagaaactccattttactgcagaactagtgtcacatcatttgccctgaatatttggttgtggcccattctgtagaagctagtgaaacatgatactctgatcacaaatgtagttcgttttaggatttgggccagtcaaacattgttaagtttgaccattacaatggaaaatattacctacattggcaacatgaaattgatattactagattcattgtgagaatacatttttgtattgcataattatttttatctcaagcaacatatttttgtataaattgatgatcaaagtctacgtctatgtccgaaacaacattcattggtgattacaggggatagatttctgcacgtacatggctgcttttatgcttatgaagtgcagtatcataatatgaaattctgttggtgattagtatcattgtgccttatgcaggaaaggggcgagcttcttccacctgatgatgctttggatatagctcgtagggtgaaagaaacatattgctatactccttcagacattgtcaaggtattgtgttgcttggaaccaatgtcttcatattttattttcttgtccttgtattttccattgatctacacaagcacattattcagtggaatatttgagagttgaagtttctccattgaagtcaaatatataaaacctattctgtgcaatgctgagaaatcactgttattttgttatggaactggtctacatgctgcatatgtttgcttgtgttgctgtaatagcgacttaatacctacctttcggactttgccttttgcaatgtcaactcatttatccatattcctttttctttgtggatttatctgttcacaagtatgataggtggttgaattgtataatttcaggagttcaagaagcatgacagcaagcctagtaaatatatcaaacaatggtctgcaatcaaaccgaagactggggttccatacacaattgacattggatatgagcgttttcttggaccagaggtttgtccgtactccgtattctgtcattcattttcatgggaatttttcatgcagtgggcctattcattattctccctccaattcaaagtagatgttctagccttgccattttttctcagaatgtttgtcagtttacattgccaatgcagtttaagtcattttgttcttactttacccttaatcaaacaaacaacaactaagcctttagtcccaaacaagttggggtgggctagagctgaaacccataagatctcgaaagcttctggttctggttctggcacgtggatagctaacttccacgtgcccctgtccatggctagttctttagtgatattccagtccttcagatctctcttttcggcctcctcccatgtcaagtttgatttaccctgacctctcttgagctataaccatccgctatacactggagcttctaaaggtctgcgttgtatatgtccaaaccatctcagacgatgttggacaagcttctctttggtcggtgctaccccaactctattgcgtatatcatcataccagacccgatcctttctcgtgtggccacacatccatctcaacatgcgcatctccgccacacctaactgttcaacatgttgccttttagtcggccaacacgcagcctccattcttccggcatcttgtttgctcgaaaagtgaggttgaaaagcttagttagccattctatcgctatgcctctaagggctctcctcacctcaatatggggatacaatccgggcccatagccttgcttcttttcgtctttctaaagcccccctgtcctcaaactcctgaattcgcacaaaacgcctgttggtatcatcaaaggagtcgtccagctgaatagtagagctcccattctctccattgaacaacttgtcaaagtattcccgtcatctattcttaatctcctcgtccttcaccaggagttgatctgctctgtccttgatgcatttgacttggttgacatccgtcgtcttcctctctcggattttggccattttatagatgtccctttcgccttccttggtactccctccgtcccaaaataagtgactcaactttgtactagcctagtacaaagttgagtcacttattttgggacggtgggagtacttgctttactcacatctcgctttgtgaccttctttgccaccttgtacttgtctatgttatctatacttctatccaggtgtaggcatctgaaacagaccttctcctcaataaccttctagacatcatcgttccaccaccaggtatctttagcttcgcttctacttcccctgaccactccaaacttctatgaagccaccttacgaatgcaagtcgtcatcttcatccacatattgtttgcatcacatccttcctcacaagggccctccttaatggccctctccttggaagcctgagctgctccctcttgagcccccaccacttcgttccagcgacacaaatccgaatgcgaaagtcaaccaccacaagcttatgctgagggacaacactctctcaagaaatcaccttacaatctaggcaagcatgactgccttctcttctctacaggacaaaatcaatctggctatagtgttgaccactactaaaagtcactagatgtgactctctctctctctctctctctctctctctctctttaaagagggtgttagctacgatcatgtcataggctagagcaaacttaagacatcttctccttgattccttatgccatagccaaagccccccttcaaaacttgtgttagatgtgcccacgtggccattgaggtctccccctatgaatagcttcttgccaataggtacactcctaaccatgccctccaggccttcccagaactccctttggtgtcctcattgtggcctatttgcggggcagacacgctgataacatcgagaactaagtccccaactaccaacttgaccaggataatccagtctccttgcctcttgatgtctaccactccataccaaggttcaaaatatcggatatcgggttcatatcagtttggcttcaacatattggatgccggatatcaggtgatatatcaggcgatatgtagatatatcgaaggaaacatatctgatttttttattattcttactcaaaacatgtatttttggtaaaacaaaatgtatgatggcaatgctttagcataacaatttgatactcctagtttgttaacttgttaattaagatactattaagaaagattcacaaaatcattaaaaattaaaaacaatatgttctatatgcttatgtacaaaacatcatgtgtgagtttgataatatgatgaagttgtaaatctacaatcttattttcacttctttcttataaagattttttgtcatctacgtatcggtctatatcagtggacatattcggtcagatatcgtccatattggtcgatatttcggcccatatcggattatatgtgtgaaaatgatatttacaaaatgatatgttatgtttatattggtagagccccaaaaatgatacatcgacctatatatcgtcgtataggactagatttaaaagcttgctccatgcttgaggctcttattgatcacgatacctactccaattctgtttgtagttgtccccgtgtaccacagcttgaagccgttatcctccacctcgttcgccttttgtcccctccatttggtttcttggatgcaaaggatatcaacaactctcctcaacgctgtatcagctagctcccgtaacttacctgtcaggcaccctacgttccagctacctaagtggattctactaggctcggctagcttccttacccctcacactcgttgagtcaaatgcgaatacccttctcattttgtgcctttaatcaatgtcacaaaaaaagagctaattagctcttgcgcttgcatgctttaccttggggaggaaaaataggttatttcatgaccttgtgtggaaaagatgagcaatatagacatgttgtgcccaactctaaaacaaaatatgtttgaaaagggggggctacttgattttgtttacatcatgggaatggactggaagctatgtactccctctgtaaagaaatacaagagcatagtatgtgaacatgcatgaccgattgaagaaatcatttcattcttcaagatttatggtaataatgaaaatatggggttccaacagattatattagtaaatctgatgtttcacaggtatgaaactatgttgaactgctaagctcttataaccaggcatcaaatcaatggacgcctttgtatgtttagacttgaagattgcaatgccttgtcacatacttcctccgtacggaaaacttgtcgctcaaacggatgtaattctagacggaggaagtacttatagaagtatcatctgactgacagacaggtcgaccaatagtatatgggaatttagatcatggttttctttattcataaatgcataaataatactccctctgtaaacaaatataagatgttttaggttactaaagtagtgacctaaaacgtcttacatttgtttacagagggagtaagtagctcaggattattccagaggaatggtgtatcattagtctaggcggattatgaaatatatcgaagctctaaaagaaacactaataattttatgtttgtttttagctaaacttaattgtgtaggttgttacacatttttattagaataaacaggcaagagtttacaagtgtccttgctcttgaacttgacacaagtagtagttggaaccagtataattttttaataacacaaatgcagatcttcttccatcctgagatgtattcggctgacttctccactcctttacctgaactgattgacagctgtgttcaatctgccccaattgacacaaggagagctttgtataaggtgctttctttgagctttgcagacacagctaagaaataatattagaaagtgacatgttgatgtgactgaaattctactatttgcagaacatagtattatctggtggaactaccatgtttaaagacttccacaaaaggctccaaaataatataaagaagatagtagacgaacgtgttgccgaaactaatgctcgtcatcgtgtggaggttaatgtaagtacaacaatgcttgactgagttcatgccataaatagttgaattgttctatatatgttcatgtttcaatgtcagtctgttgtaatcaatagtctatatgtgattgattatgtttgttttgtttgtctattattttgatttcagcctgttgaggtcaatgtagtcacccatcctatacagagctacgcagtttggttcgggggttctgtagctgcatccagccatgaattcttcgaggtacctgccacttgacactaaatttcacacacagaagttaatattagtgcatatatttctgctgtattaactgttatatgtcgatgaaaggccaagttacaatgtgcaagtctttcagtccacgccactccagacattaacattgtgcaattgggctatgaattcagtcatatttctgtcgacatgaatagacagatatacatggaattaattgattattttttctattctcattcagtgttgccacacaaaggaagattacgaggagcatggagcaagcatctgccgaacaagcactgttttcaaaggaatgtactgaagttttgacgtatccaacgtttttttgtaggagctttactaggtttcttcaaatagaatagagtcaaaattgattctcctttcggctcgtctcaaccatcactgggccgatagatttgtagctgaatatgtagctctctctgttctgtacgacatgttgtgtatagtcagcaattctcttcctgttccaggtgcatgtttgtttgtagccagttgtgttgttaagcagaaagatgtttccccccttgttttcttgttttttcgactagactagaatagatagagagttgctgaaagagttttgttatgtatcaggctctgtctaacgctatcttgtttcccctttactatttttttgctacggatccggagaaa

SEQ ID NO: 72 - DNA, 5273 bp, Hordeum vulgare
  source 1..5273: mol_type = genomic DNA
ttctcctcagtcctcccagtaccggaggcagacacgacacgagcgagagccgacagacctaaccagccagagccagccgccactccccgtcgacggctcgccgtctccccgttgtccggccgcccgctcccttcctcgccaccgttcggccttcagcagttccgtccggacgctgcctttccctgcccccctgaccgcccggctgccccccctctcctcgctaggcgccggctcgcccgcccccttccctcgccgcgagctcctggggcaccggcgagctctagcctccactactaggccccaaggcacccaccggtctagccattcacagcaaggtattgataatggattgagttgtttctctgtttgtgaactcattctttaccccattttttacatgctaaagcggtgatattcagctttgtatgcccaactgtcagtactctataatgtacccaacaaccgatgtcattgaactgatgcaagacagaaatgtagccactggtttactgcttaatgcttataatatacaatcgattgatgccattgtatagtggaatttggaatatatttcgtgagctatagtgttgtgagacttgagttcctgcttgtggtgttacaaaatatacctagctgctgaaacctcgtggcctgttttcctagttgctatgtcttggtaagccacactttacattttctcaccggctccatgatttgctgtattgctatacgaagttttctgaaaaaaaaaaatccatgtcgtacttgagccacacctacctaggtattatgccagatttattatgtctgttgcaaacacacatgttgtttacatgggaagatctatatgcagtttttgagcaatttatgaaatcgatccctttttggttctttatgcaggacccttttgaattcaagtataccagcttgggtctcagttggatagagacagacttgaataagagagaagtactagtgggattttacatgacgggtggatcacgtgtggtggtgatagacaatgggggtggtcttctgaaggccggttttggtggggacaatgatccaattgctgtcgtccccaactgtatagcaaagtctcctggttccaacgcaaattcgaagaaatggctggcggctgaccagctacaggcacaagacgttgatgtcactggcgtgacgttgaggcgtcctattgaccgtggctaccttatcaatacagaggtgcagcgagaggtatgggaacgggtcctgcgtggcctgctccaggtggatccgacaaactcgtccttgttactggtggagccgcagttcaaccctccagcattgcagcatgctactgatgaacttgtgtttgaggagtttggcttcaattctctttgtgttgcagacgctccttcccttgtccacctttacgaggcgagccgccagccgtcactctttcattcccaatgcagtcttgttgtggactgcggcttctccttcacccacgcgtcccctgtccttcagaactttacgctgaattatgctgtgcggcgtatggaccttggtggcaaggccctcacaaactatctcaaggagcttgtttcgtaccggtcccttaatgtcatggacgagaccctcctcattgatgatgcaaaggaaaagctatgctttgtatcccttgatgtccctcatgatcttcgccttgccaggtctgctgacttcctcactgacatgatatgggtatattaaattaccgtgttctcttttatttgtttattaaggttagagtgtgaaccaatttcaggataatttttaagttaaaatgtgaccttcgtatgtaaagaccagctaggaacttgtacctcttgtaatctgaactgttaatgaattgtttgagcagcaaatctaaccatatgtgctgatagaacggtacgtcggtacctatggaactatgttctgtatcttccaaataaatctatgttgcttttttcttttcttgctgaaaacagaagggtaaccccctgtgtcctactttactttatttgaaacaacaactgttcattagcttcaaatacctggatacttggttagacaggttgtagactttagtggaatggttggggttatgatagcttcaaacggagatggctaaaaaaagtatccgactgtacaccatatgcacacactcatgcataagcttagactatggaaggaaagtatagttataaatcttgtactcgatcaaaacaaatattatggcctagagttggtttcagactttcagttgccagaccaaacaaatgcaaacccaccatgtagttagagtctgaatggtcaggtatttggttatgttcagttgagaagatatgacaaggaacgactgatcctttgcagtctgaatagctggtagtggtcccgttgttgagctgtgagtactgagtaattaatgaatgtgaggatccattccagcaaagtcaaatttgattaagactttcaaactttaaaatttgccactggagctggacagagatatcagttagtacttcattgatttactactccctccgtttctaaatataagtcttttaagagtttttaatagaaaactacatacggatgtatatagacatatattaaagtgtagattcattcatttgttctgtatgtagtcctctagtaaaatctctaaaaggacttatatttaggaacagagggagtagttggttgattggttgaacacaactgtggatatctgctcatctatgtttgacattcgaaataattttatcacactgtttcacctagctttgtttcttttctagtttaggcaatgtgcacaccatcatgtcattgtgtttttcaagcaccatatactgtcttgttgatcagttagacagttcgtcaaacactacctttctctgtaattacaaatgatcaaatctcttaacagtgtgatatgcaattattgcagtttatcattcaaagacaacccatttagatgttcttacattctccctgatggcataacatacaagaaagggtttgtcaaagacttggatgaagcacgtcgatactgttctctgcctgttgaaggagaattagataaaaaggatggtgacagggacatagacaaggatcgaaaaaaacctgaactaagtcaaaatgtaacatcctgtgtttttgttacatctcgaatgttgcttggtatcatctaatggaattttgattcgcaggaatttgccttgaccaacgagaggttccttgtcccagagatgctttttcatccgattgatctgggtgagtgtcatctaaatgtctcttataccttctttatctgtccctatacttcataaatcatgatctgtttttgtagaacatgcccctagcattgccatagcatccttgtcccacagagactaactcaaggaccctgcatctctctctctctctctctctctagctagccccctctcattgagacgctggattagcagagtgagcttcagagactactcaagaatccggaacgtaattttaatttgtcacccttaatgtaaatgatttctcaaccaaacatatcaaacataatcttttgatgctagttaaggtcatataaatttcaggagtgtattttctgcattctgcaatgtctgtcaaaatgtgtggttatcattgaaacactgtcaaaatctatggtacttccattgcattaaactggataagttttgccttgggactttacatgttacaacggcaggctttgcattttgatacatactaggagggcagcctagaaaatacaattggtgggacgaatcagagcaaacataaaacaaaaaggaaaggaaggatagacaacttgaatatggagttttttttaaagggaaatccaaatatgcagttaatttgcttgttcagaaaatatgggggtagttttgctgtaagagcaaaacttgggtcacaatttctctttttatttctccccagttttgatggacaacaaaacagtctgtcttatcttctgtccaaaaagtgttttttgttaccgtggaaggcaggtgctctgccaattcatgttgatagagaaatgaaacaatacagagttatgtacatcatcttttcaattaatttcctacaagcattaccaatcatgatagttctgtttccttctgtttccatttttcccactcaaatttagctttgacgtactccgtattttggatcagatggatagaatagattggcctattgccgtaagaaaaggaagcaccttaacatatataggctgaatgactgtcagaataacgttaatttgtgcaagcgagcagcagcaattccacctactgcttcagctcattagtttcccttctgcaagggtaagtaataagaatactgataacaaaaaaattgtaggcatgaatcaagcaggcctggctgagtgtattgttcgtgctgcacaagcttgtcatccatatattcaacctgtgctttatcagaggtacgttttgtcgttaaatggtgaaatgcctgatgctatcttaaccttttgaccgagtgactcttgttctcatgaattgggctgttttcagcatcatcttgacaggcggaagcacgttgttccctcggttcgctgaaagattgtaagtattttttttctgtaggaaaagagacagtgttatctcccattgcatgagcctgcgtgcatcatcttagttgtttgtatcaacaggcagagagaacttcgacctcttgtgcccgaggagtaccaggtgaagatcatttctcaagagaagtacgtcccttttaccctgtttctgtcttggcgtctctccctcgtttcactaacgctcatgtgcggcgtgcatggcgttaacgttctgccactttgcgcagcccaattctgggtgtctggagaggaggatctgtgctagcgtccagccccgatttcgactcaatgtgcgttacgaaatcggagtacgaggagatggggtcggcacggtgccgccgaagatttttccactgaagagttggtcagtagatagggcaatgcagcctgtttccgatgacatgtttagcaagtggcatgtaaattaggggtttgtcttctacaaaaggtttaacaagttcagtatttggaatagacaaatttaactaacgcttagttggccatgaaactagaggctgtcttccccatgcggatcaactctgtatgaatggactcagttgtgggtgggtggatttcagattttcctgaggattttcagttttttttcttacattgagaaaaa

SEQ ID NO: 73 - DNA, 5150 bp, Hordeum vulgare
  source 1..5150: mol_type = genomic DNA
caacccactcggccactcctcccccgcgctcctcctccccgtccgccgcatgtagcggtcgccgccccgccccgccccgcccgtccgagcggccggccggaccatggcgtccatgctgctgcgcaaggtgtggggctccgtgctggcccgcgccgggccgcgcgacccggacggcgccgccgcctcctcctcctcctccccgcgccgccgcggcgccccggcggcggcggccgagtacgggtcgctgggcgcgctggacgccgtgccgatcgacgtgctggcgcagatcctgcgcctgctgggccccgccgacgccgcgcgctccgtcgccgtgtgccgcacctggcgcatcctcgcctccgacaacgccctctgggccttcttcctcagcctcggccccgacccctgggacctcgtcgtcttcgccgagacccacctcgccgccggccccgccgagccccgcaggtcggttgcccttgccccccctcctcctggctgctcacgcggccggggccttcccattctgtcgtacgcgtctccgtttccttcgcctgtctaacaccactgtgccgtgcgcacgcagcgtctacttcggcgctgtccgcgtcccgccgcagctctccttcaagcgcatctacggacagcgagcgctggttccgggctctatcatagtcgatggtgagtagccatgcgcttaatcttgtacaggtagccagcgattacttcttaatcaaggggggcagttgagttgtgtaagtatacatgcattgattgcttcattaaggattctatacaaccaacaaattctcacatttcaacaactttaatcaagaaaacaccgatacctccggcaaccagagaatactgattctttcctgatgcgccccgataccttcaagctctggtagtgccggtggtgggctcttttccccggtgctcccgctccccttccccccacagccccactgtcttgtacttcatccgttcctaaatatttgtctttttatagattttactacggactacatactacatacggatgtatatagacataatttagagtgtaagttcattcattttgttccgtatgtaatccgtagttgaatctttaaaaagacaaatatttaggaacggagggagtagtagaattctatctaatggaaggctgctgatttcctcctcctccctttctctctaactgaacttttatgtttggtaaattactgctaccctttggctgttggttcttgctttttgttggaatcatggataagaagatagaagataatggactgcagtgactaaatactatatgataaatggtttgatgcttaatcgataacatatatttatttatttttttcaaaaatagtcaagcctatccctgtattggcgttttttttttcagaaatgacttatttacatatccgtatcgcaccaatactgataagcgtatccgtttgagtgcaatctagactccaatgatcttaccttcagttaccagacattttttttttcaaacggccatgtgcccggacttccgattccactattaacagtaacagaacataacatgattcaagcatcctgatgcaattgaaagcaaacacttcaattactagacatgattaggtatcttcagtaatcattaggttgttatggtaggctgattgtatctggccctttgctttgtgcgacgtaatagtttttttttgttggagaatgtacattgtttattgatcttggttgtttcggcttcatagtctccttaaatggcgcattccctgttgtttcttttcttaaataacaggtgggtcaggctactgcaagtatggctggagcaaatatgctgctccttctgggcgttgtgcaacctttttggtaagctgtggtgattagtgaaatctgaaatctaccaacccaatgcacatcaatcattcatcatgaccaacatttttctttgtggcacatgatggccgatgttggtttaacaacttcacggtgataataagataattgaattgatgatataatttatgtcctaattctgctgggacatcatgcaggaatttggtaacatcgagtccccaatgtatgcaagacttcgtcactttttctcgacgatctataacaggtctgtaagatcttttaatttccactgcaatatcttgtatataaaatatttgctttaccttttttgctccatttcaatagacagcattttccattgatgatctgagttctcaccgggtgaattcacttgaaacactcacacacaacttatattgtgaaaactttggctgactaggttggtctactatcaaagtggctgcaccatatcttgcttgatcacaacacacgaccaatcaatatgcatatccagatatttttgccataaactcttatctatcttgactttttataggatgcatgtaaagccttctgctcgaccaattgttgttgcccttcccctctgccactctgatggttagtatttttaggtgatacaattttctactttatcactatttctatatggcggccctgttatatggttacatgtttttgcccattaatttgtcgctatggttgatgaacaatttcaaacttctttgtctaactgtatgtttctaactcaacttggtacagataccgaggctgctagggcttcaagaaagcaatacaaggagacattatactcggttttgtttgaaatgaatgttcctgctgtttgtgctgttgatcaagtaaggaattttatgttcacttggtgattttgctcgcccaaatgcttacatttatcacctcttgatgtactttttggttcaaccttgtgtaccactgtccctttgattaattttgttgtcatattgaggtttgaggcactattgttttttggatttggcatttggaaaagtataagattcgcatattatagtgtcagaatcatgaatcgcggttcaagctggaagcctggaacttctcaactgagaattttctactgtataatacacctgtgttatggcgtaaaatttaaatcgaacatcaatgtagttgtagtcttgtagaagccaccttttctgtttactttattcgttaacttcacctgctgaagaagatattttgtgggattgttgacatgtgtttttacaggcactcctagctttgtatgctgctagacgaacctctggtattgttgtcaacattggattcaatgtcacatccgttgttcccagtaagttctggtctaaggttcgactcagtcgagcatcttactcttttcttcagtatctgatgttttctcttaagatcagtagacatggccgatatttcaagcccacgtttgccactcctaaccttaggcctaccacaattttattacatcgaatatcaacttaatgcaaataatctgcttgagtattgataaatgtgtccttcctgaaatacacaggctaataggaatgcacatcagagggagacatagggtgggaccataggggttttaagactccgtgggctgtagactgttaattattcatggtcgagcttctttccaaatgtttataacacatggaagtgcgtctagatcaagtggtaaaaatatccatttttttatcttatgtttcttccttgcaacagttttccaaggtagggtgatgtatgagataggcattgaaactgtggggcaaggtgctctgaaacttactggatttctgaaggagctattgcagcgaaggaatatttcttttgaatcactgtacactgttcggacaatcaaggaggtaatgttttgtttattactcaatttagctaatgtaatttattgtagcttgcgttctccacataaatatcacctagtggctaattgtgcttgtaaccgattagttgggggctacagaccaactaattgtgcttgaaacctatattattagttggggcgacatactaatgaactatttgtgcttggagccattagttgggcaacctattttgattatgtacatgacagaaatggagatgatactaacacatgattctacctcccttccttttctatctgtaaagaaaatttgctacgtcgcgtatgattatgaagcagaactatgtaaaaatacacaagcttcctgtgaggtggatggtgaagggtggttcactctgtcagaagaaagattcaagatggcagaaatccttttccagccccagatgggaggagtgtatgttatcttctctgttgcgtaaccttttttgtcattttccttttattaatacggttcgcttatgcttgctcgatgttggtgttgcagtcgtgctatggctttgcacaaagcagtatctctatgtgtggatcactgctacaatgcagaggggctccgtgaccacagctggttcaagacggtggttttagctggtggatcgtcatgcttacctggtttgccaggtatgcttgcctaatgcattttaatactgaacagctcattggatgttaatgcatatcacaaaataaatgtagaacaccggtggataaggctgtattttcattgtgaacagagaggctcgagaaagagctccacacacttcttccttcatatatctcagaaggaataagggttctgccccctccatttggcacagacaccgcctggtttggtgcaaagatgatcggcactgtaaggacagcgttgattctggtgatcagtttatcgcacttatatcttcactaatgaccgccctaattcaggtgagcactttctcggacgcatggtgcataaacaagaagcagttccgccagaagtcacgccacagtggtccatctttagcgaatgcatggcgatagattctgatggccgcagctatgattggcaaagccacagggaaagagccatgaggttgcctatcctcttaagagatggcgcagatctatacagcactagttcctggtgtacataacagatacgattacctatggatgatagattattgcgagtaaataaaacatgataggttgttataggatgctgtatagcataagtgaatgcatcgcgctgtgcgcattagaacgattctgtgttatttatgtacccgtacgttattggtttgcagataataacacctttttgtttcaaattatttgaagttctagctttatccaa

SEQ ID NO: 74 - DNA, 6477 bp, Hordeum vulgare
  source 1..6477: mol_type = genomic DNA
ttccgtgaatgtccccttttgcctctctgcttccatagcacagcgcgagctcgcggagaggacgacgcagcccaagttaccaaacctcctcccctccccaatcccctccgcctccggcgtcccccctctcgccgccgccagcgagatgacgccggtctaccgcgcgccgcgggagaccgacttcgcgcgcttccccgactccgcccccatcgtcatcgacaacggcgcctccaccttccgcatcgggtaggagccccgcctccgccgccgcccccggaaccccccgaaaccctaaccctaacgcgaccgttcgctcgctccgttgcgtgcaggtgggctggcgaggcggagccgcgcgtctccttccgcaacatcgtgcagaggccgcgccaccgcagctctggtacgtagccccgcgggacgcttagaaatctcgaccttcgtggttgcccgatgcgaatgtgttctggagtttacgtagttgtggttcgttttgtgcgcaatggcgctcgcggtttcggaagttcgccgtggcattccgttggtgactgggcgctgttcatgaggcctggttttgtcccgatgcaccgaaatcgggcgtatccttttagattgatatacgcctagttttttttttgtagatgattttgatgatactttggtttactggactgccagtgattctgaagtcgtgttagagtcagatgtctgtagaaatatatttgcaattgtgcgagtgcgctgcaatgtccatggttttatgaatgtacaaaagtggcatcactttattttggatcccttatgctcgtgtcggttgatggacttgtaagaagattggagcgaattctcatattttaactgattgcagtttgtttctgattcaacaggtgaaactgtgacagttgttggagacactgatccagctctaatgaagtactttgactgcacacggacatcaattcgctcagcatttgatgatgatgtcgtctatcagttcgagtacatggaatatgttcgtcactcctacggaattatgttcctgtttttttgatttgtcagcgagaccagcagatagtttataatgcggttttaggcttcaaattgataaacttggcagtcaatgtggcctgtcatcctttctccagagtacacttttaattttgcattttttaggaatctgcaactcttaggtcttgactatatgcttgatatcgatcatataggaaagagttcatacgagtgttgaaatatcagaaagatgcatattcagtgcttaagaaaaaattcgatgtgtgccacttgtgattttgagttgataaagaacttcaaaatgtacttctgtaactgcacttattccttttaagtcactgtacttatttgaatgtgtttgataagtcactgtacttatttaaccttttttatctggtattatctgaatgttgcagattctcgattatgcttttgaccgattaggtgccacatcagaggtaaatttacctgcgttaacacatgcttcttaaataatttccttcagtcttattttcttttcttccttggtttggtggcttgtcttttactttgcacctgataaataagtaacttttacatagttagtcctgttgaattagaaaaggagcaaccaggggttggttatgcatgtcaatttacaattctagttaccagtgtagtatgtgtagtggggactagggactagaaatcatttttctagtgagtggaattcaaacaacgtcgtaagggctctgggaaagaactttagtctcccagcctccgagcatgaccaaggtgaacagaaagagtgaactatgcaactccatttctggtaaatgacaagcacatatggttatctcatttcaccagattttctccttagcagtgaatgttgaggaataacacaggaagagttggtattccgaagctagtagtttgctgttctcatgcaatgaatctgtaaagtgaaaatccaacacgtcagttcatttagtctcatagttctaaatctcatagttattgacttgaaagatgagtaacttatatatttacttgtatcttcaaacttcacaacttagtttttttctttctataaacatcacaacttgttttttttcttcatataaacaaataattgtttgaatactgttgaaatctaactattatttgcttaaataccggtcaggtgggccatcccattcttatgacagagtgcgagtgcaatccatccttttctcgagcacgaatgtctgaacttcttttcgagacatatggtgtgccatccgttggtaatgtcttttttgatctttatgtgccattgttatgacttatgaaccacatctgttagtatagtagtgcagtagcacagtcgacagaaacataagtaataatgttttctttaactatttgaatttcagcttttggtatcgatgatgtatttagttacaagtacaatcagaagcttggaaactgtggagaagatgggttggctatttcgtgtgaatttggaacatgccacgttgttccagtaagtttttttcaagatacggtttcctccaactgtgtgcaacatacaagtcatttcatgtctctccttttgtcagataccattaaatgagtacaattacatctgtttaggagcaaataccattgactgtgtttgaattataagtttctaattggataaacagaaacattttacagtagatcatatgttgaataaaaagaaacagatgctaccattgtgttgctttccaggcatgtactgtccccttttctgctcccagctccacaacttcagtcaaaaagatgcatttgcctattgggttactgtgcagagcttgagccaacaatattattctggcaactctctccatgaggatctgcacaacaaattcattgtttggaccgaatgtgctgtatattagtttggcttgttgactatttcagagaccatgttcaagaaaaagtctcagcaacttgcatttatctatctgtatatttcaaattaagttgttgatctgtggactaaaagccatgctggatctgttttcagttcttaaaagggcagcctgtgctgggggcatgctgccgaacaaatgttggtggatctcacattactgatttcctgaggcagctcctctctcttaaatatccctatcatgtgtatgtatgagcacatttttccgaagtactttgttttatttgtttcccctaatccctaccatttccatgtctaacagtagccattttacatttgcatagggcaaacttttcatgggaaaaggctgaagagctgaagaaggaacattgctatatagctgctgattatatgtcagagttgcagatattcaaagtaagatatttgtatctatttctttgttcgcttgtcaattttcagaattatcaaattcctattcccgatgtgttttcgtgtagaaaggacaggcttttcactgcagttgccttttcattttcttggagtttctttatagaagcatatttatagcaattatatactacattgttgcaacaccatgaattgatcacttcaatttgcagaataacaaggaagaagctgaagagaagactaggtattggcagctaccatgggtacccccacccagagatgaaccgccatctgaggaagagcttgcgaggaaggcggcttataaggaaaaggctggtcaacgtctgcgagacatggctgctgcaaagaagtctcagaagatagcagatctggaagaaaaactctctggcctggaggatttgatggatcaccttgatggagctgatgaacaagaagcaacgtctattctgggtagatctggatacctttcccagcaggaaatcaagtctgatattctgaaagcaacacaatctctaagaaaagcgaagggggagtccaatggcaatgaggagaatgcagatgcttcaggagctgataagtacccacttgtatctgtccctgatgacatgttgacaccagagcaggtatgtgtttagttaagctatcgtctatgacttgttatgtactagtcaacgtctcaacgatgggattcattaatgcgcttttgggatcatcttgcaccttcgtaatggtaggataaatgtaatctcccatggttaacaacttactccctccatccatatatatagggcctaatgcatttttcgagattgcctttgaatattgataatattaacagtatatgaaatgtataatgtaaaaattatatcattgaaagctcctttcacatacgaacttgaggatatgctttgtgtaacttgcatgccatatattattgctctaacatatggtcaaagttagcctaaaaaaccgcattaggccctatatatggatagagggagtaacatcgttctgtgtctgtgttccacttttgctcttttccagttaaaggaaaagaagaaacagatactacttaaaaccacaacagagggcaagctgcgcgccaaacagaagcgtgccgaggaggcagcattgagggagaagcaagaagaagagaggcgcacgtaagtggcgacattcccagtctgtaatttgttactccctctgttcacaaatataagatgttttggatattccaatatggactacatgcggactgaaatgagtgaacaaacacactaaaatgtgtctatatacatcgattcagaaatgtgtctatatacattctatatggtaaagtcctgtatgaaatcacatgccattgtgtcttgttgatgaaacagttactaaaagccattttgacacttcttttgttcttttgagacgttccatgttcatcaaattttaaactgtaataggaaagtacatttctgtatttttgtaacagcaactagtttttttttgccaattttggaggaaaaaccagtgtttataccataatagcaaactagtaaccacatattaaaaaaagatttaaggagaagaaactccctaacttttcatctaactactagttgggagactcaaacccaggtggggtgagtggaaccatgtcatttttctctaggagagctccccctagcaaccacatttcgctgagctcagagctgcattggcttcaatgcattagaagtttcttaaagcttttgtttctgtaagagaatatcactagaaaggctgaatcttgtgttaaagatgctcttcctcgaaattggtacgacttctaaacctgtcttagagatcaaagttacaggctgataggttctacaacctggttgatatggatagtgtactcccagatgtgcttgaggttttctattgtttcttctgtaatatgttgtcactcttaactacacagggagaacccagagttatactttgatgagctccgtgcccgatatttagaactttctgagaaagtcgatcagaggaagcgacaaaaggttaacggcaacaataattcatctggcgccgtaggccgtggcgagcgtctaaatgccgtccagaaagaaagaatgcggctgctcaccactgctgcatttgaccgagggaaaggcgaggacacttttggaatgagagatgaagattggttggtctacaaaaagatgagcaaagagagcgaggaagatgatggaaaagatgatgatgaatcagaacttgctcgaatcgcgtcaaaaatccaggtaaggccccactctcaagctttcctattcatgatgtccattttctcatgatatccgcgtttctttggtgaagtaaaaaaacacaaactaaaattgtatcatataacatgacgcttccccgtgcaggaggtggaccctacgtttgtgaacaaacatgacgctgttgaaccagctccagaccctcataaaatccggcctctcactgcagaggatttcaaaatcgccatcgggatcgagcggttccgctgccctgaagtacttttccagccaggcatgataggactcgaccaggctggcattgacgagatggtcagcatctccctcaggaggttaatggaggacgagtccgtcaaggagcgcctctgccagtccatcctcgtcacgggcggcagctccctgtttcccgggatgatccctcggctcgaatcggggatccggcagttccggccctacctcacgccgctgaagctggtgagagccgccgaccccatcctggacgcgtggcggggcgctgcggcctttgcggcttccagcaagtttgggaagcagaccttcacattggcggattacagagagcacggcgagagcctgttccatcgctacaacattgtctacacgctgtagcagccttctgttggtgtcttctccgctagcgtatagagaaactgacgcgtcttgcttgtaaacaaaagtttttttttttttttgcttgtgatcatgcatcttgtgaagatgacatatttttaactcttagaaacactgataccgatcattattgtttattagtcagtatattaattgatatccatagtccaa

SEQ ID NO: 75 - DNA, 13656 bp, Hordeum vulgare
  source 1..13656: mol_type = genomic DNA
attcaaaccgagcgtccaacccaacgcaattacaggaggatagcaaagggaaaaccacttccgataaccagatccgttggatgccgatcggacggccgagtcacctcctccctcccccctaacccgcggctggggagcacagccaagcccccgctccgccgcgaagagccgccgccttccactccggcgcccccctccggcgcgacctccagcctccgacgacgaccagatggtgagctcccctagcccccccccccctccctccttccccctccgggccgcccgaatccggcgggctcggttcgccccggggagtaaacccctgccgagaaaccctagcgagttgctgctcacgtttgtggttctgtgacttccgcaggactacctcaagacggtggtgccgtcgcagctcttggccgagcgcggctccagcctcgtcgtcatcaacccaggtgcgccccgccggagcgaatcccccaatcccccgcctgtcctctagatacgcgctttccttcccctgtttgttccgacgattcacgcctgctggagtccaaactgggtgtaaaaaacaacgtgtttagtgtagttcgagctgatttcgcgaggctcaagcccccggcgaagatgcatagtgtgaatcagaaggtcgatcttgtgcgatgctacccgttgaaattctagaagtgagatgaatatgtgtgaagcaggaatgtcgtcttcttatatgccggtaatttttgccttgagacatggtggttgtcacctgaccgaggacccttccttttcgcaggctccatgaacgtgcgcatggggttcgctagtcaggacgtgccgttcaatataccgcactgcattgcccggcacaagaacgacgcgccgaagctgtcggtgcgagaccaggtgatgcgaatgcaggggtggtccccccccccctccctccccctctgctggtcctgtacctgcattggaacatcgttggcgtaatcttcagtgtatgactgtcgttttggtttgcagaggctcaactgccgtgctgggtcgacgcacaatgcagagcgggagcgggcgtatggtattgtaagaatctacttctcgcaattactttggatcatgtgcgcggctcgaactaatcaggactgagtcttgcagattgcttcaatgctcaaaatcccatttttgggtgaagtatcgccttcagagaaccaaccattacctcctaaggtactgtgcacagtctatgtgatgaatactttgcatacctgtttttgcgacagtaggatatattgcattttgccatccgggttaatctttttatatattaattgggaaaagtatcaccccagatgtaggctttgtctacttgaatttgaatagcgatgtccaactagtttagagtgtgggcaatttatttatcttttcttacacatcgattacttatcaatagttattcttatgcttctcggggaggtgtttgctccatcttatctggttgcacactgctatacttgggcagttaaaaggagaactagctacttagagcaatttaccaacaaaacagtggccatgtgccacatctcactaaattagttctatttttagaatgtgaaaaatgttttgtcagaccgtaattagttgatctgcagtatgctgcaccatgataatattatgataacgatccagttcactacgggacatacagcaagtgggaggaagggaactttgggacttgtttgccctatagtttaagcttatttgataagcttgtggcattgaggcttataagccgagtttacctaggatttagggcttaaactatcatgaagtttgttgtcattatagtttataagttcaacatactacagtatgtggtaaacctagctcatccagcctcttccaaatttatagaattatgtttgaattacctattgcctaagtttggaaattgttgctatttcttgcaatcttacaaatccttattgaaacaagtacgcctgtttgatgtgtgcaatatagacaatgttcaggatatcggtaactggtaccatatcgtccaggtgctgcgtaaggataaataggcgaattttccagttaatcagcgataaatcagttaatcagctattcggtgacccaccgagtagcgataaactgaccgagatgctgattaactggctgatatttgggataatgatgtattatatgattttgcatcaatttccttttgtttagaaaggtcaaatcatggcctctgtttgctgatggggttatattgaccacttcagatgggacgtcttgatggtctttcttcacagcaaaacaaagatgatagtatactcacatggacagatgtgatggacaaaagcatcaaaacatccatgtcaattggtactttctgatcttttactgaagtgtaccttcttatttccccccttgtccactttggagtcttctattgttaataaaaaggttacagggtacttatgttttggatacattttttttttgtagaaggaaactgtgtttgttttttggtgtgacttatatgtagcacctgccctcagtgagttgtggcctgtgtcactcatatgcattgttgtgattgattttgtaccacatcagatttctcatgcgtttggactgcatatatacaaaaaaggaacgatctagtaaatccacattaacctatttctgcgaatcatggataaaagcctaagtgagttgttatgtttgtctgtgcttatgtggtgttggcgctttagtctagaccttggatgttacattatgacacaatgattttttttgttttgtgtgctggagctagctagctctgaagtttcgaggactgaaattcttatgttaggttagctgttgctttggtacgagatccacatattttttgtcccgtctcttcttacatatggcatgtatccatcagaacgagatctcatcaatcaccatgttttgtctagctgctttagattgttcgatggggcatcatactattttaattttttaatggagtagttatatcatggattattttctcactgcttgctcctataatcagagttacttagttatgctctgttctttcggttattaagtattaacagtagattcaaagagcagttctgtaccgcattaaagtgtcatatatttcggagcattttatagtatcaaaatattgacaacccctcaaattggccagaaaggtcagtaaacagtgacgccgatgaagatccttcacaaagcacacccgatgatggtaacaagcccaactctgaagaaaacaagtataaggaaatgatatttggagaggatgctttgaagatccctccttctgcaccatactgtttgggtcgcccgatcaggagaggccattttaatatttctcagaattattcgttacatcaggtatgcctctagattccatatgatccttatcttaaaagaatcagctagttatagtaataagtgccgtaactaaaaccactacacttattatggatcggagggactattaaacaactttgccctttaaatgggaagttcagtttgagttcattgtctgagactttccattgttacactgtcagttctataaatatctagtaggggtgtattgttttggctccactgtaatcagtatggggaatggtatttcttgtagcattgttttatcaagggaaaaatgttttgaatcagatttgtgacaggattttggtcaatccggttgcaaatatgtactgaaatttatggaaaacagtagttgagaggtctactgaaatgtactgaagaaggcaaattctgcctatttctttgcgtgcaaattttccatcacccaatcctaaacagatcttcatgaaaaagcttccgctgcaccctgcattgtctaaaggcaccatatttacacgaaagggtttacctaattttgcacctacttcactggtaaaacataaaattgagcagtttattctgccggtaaggcagttattaagttttaaatataaagtcttgtggtataatattttagagtatctatattagctaatggaattgaaccatgaagtccttatactaacaactgtggagcttgggttcaaagttaagaactaaaattgttccatattacttgttattctttgcctttatagtttatttattttactgcatttgtttgctgccactgacgaaccataaagaaagactaggaattaggtcatgagttgtaatcctggcctacatattagaaaatttacattgaaaacacagctggattgttttttcttggttgaaattgatggtatctggcgcagaaagtgttggagaagagatgatgcacatgataaccctgtgtttctaactggttaccaaacctatgtgcgtccatattatttttccttatatatagcatcataatggtagatgattaggaaaaacaaacattggccgttgcaggttttagaagatttacgaactatttggaattggatgctgatagagaagttgcacatcaacccaaaggacagacatctgtattctgcaattcttgttcttggggaaacatttgacaaccgaggtatttctcttttcatgtaatactgcctgtgatgtgtagacgtatgtcatgtagtgctgctcatatgcgccgccgcaaggctgagtatcctttagggctggtgacatgatcctcaggtggagcaggatatccttagtaataattaggtagttagttcttaagtttgttcacttgccttatccttgaaatttgctcaagctttcctcatctccgaaacctatatataagggaggctgccattgtaatctcaagaaaccatcatattgaaggacattaatccaatcccatggctggccgattgtcatcttggcatggtaatttacactgatgtggaaaaaagatcacctcgttttgctttaccttcaatttggatgtcaacgctgtagttatcccacatatacaacagcaatgaatacctttcactattattttccctaaattacacggtactaaacagcagttgcaggaagaaaaatgcagaaatacatcgtgtatgtgaagatcacagtttccagcatttgactaggtgtcaatgccatgttttctgccaatactgatatttatgtgtaattccttttttctgaactcctaacaactcaaatctgttcattcaacacgaatttcaaatgctgggcagaacacactttcctagcaacgagcgaaatccacaccgttagttcttcaatagattctttcatgaaatccatgacccattactccgttagtttaatagccttgaattgatgattcatataggaaatcttgagtacatactgtttgctttatcttttttcaacaccttctacagttctagtgcaaagtgtatgttccactgcataaggaagttttcttattttttgaagttgtgatttttttaatatatccatccatcagaaatgaaagagatgctgtccattgtactttgcgatttgggatttagcactgcagtggtacatcaggttcgtccccaatcgtccatttagcatttacttcctattaagttttgaatgcacgatttgtttctccatttgcaattgctaagcaaagtaattggaccgttcatcccaaaatggaacatctttccagcatactgggatagtttcctcaattctgagactgttgtactatgctaaattgctaaccactaagaagttgtatttaccgagtggagtgcgatctggcattagtacatgatgcggtcgcctttaaggaattgctctgatgaagtaattttactcgtgcgtcgatgtctatattctttttctttttacataactacataatgctggcaagggggagcccttcatcgacatgggccaatccatcactgtagagtgccagaactgtgtggccgtgtagggtcgccactgtagtgatgccatgtcgatgcagtcgtgccgtcgtggatgacgcggtcgatgtcgtcgtcgtggcgcggtcattgccgccgtcggggtcgcgccttgcagaaaaatctgttagaggacgctaggtgtccatcttgtggacgaggggtggcggcgtgttgacgaagatgttgatgaagaccttggcaatgaagcgtcggcgatggcgtcgtagcagcgtgtcgacgataatgtgccgcttgaaggcgtcccttgcggcgaccaagtgtcgatgcggtgtcgcgtcggagaagtcgatgaagaattgcatcacttttcacaccggcctgacgtgtggatgatgcgtgttgatgtggcttctcaaagatatgctcgacaaagatttttttttccaaaccatgtagtcgtacagctcaatgtcgtggtgcagggtcggtgtagatcgctcgtcttgatgcagatgctacggaggaccgtttggccgcgggtaccgctcctgcgtcacccatcaatgcgcgtcaggagaaggcacttgtgggagtccaagtcttgctgcatgcatctcctcgtaggagattgattcatatggccatgtgcatgatgcctagatggatacgttatcatgcatgggcgtacctacgcatggctggatgaaggctctgctggtcgcttcacaggatgttgtggcgttgatgcagatccgatggcatccctgttggagaagccgacggctacccttctggaacgcgctcgctcgatgcctgctggtgcgcgacgtacgatgccagctgattggcgttgtagcatctcgtcccctggtgaggccgtttggttcgacgatgaacgtcatgtccattggctggaacgttgtagcatctcgtctctgacgaggccgttgcttcgatgatgaacgtcatgtccagcagtttgaaatctatctgtaagtggatgcaatctggttgcatggggctcgccgcgtaccggccgtggagttcccggagaccatacctacaccggctcgcgttgaacagattgcttggaggagcggctgctgcttgatgagcgcgcgtgcctggaggtcgtgtgggtcgatggagccgggtcgtgtaggcgtgcagatggagtctgtgtcggccgggagatccgcgtgcgcgagtccgccctcccgtgatcgggacacatggtcttcgctgctgttgccttgtccccgatgcaatttgcatcgccttcaccacataagccgggttgactgcacgccgtcaaggtggatttgcaccgattctcaccggattgatagaaggtcgtggagatctaggaatttatatgtgtggctaaagaaaagaaaattgatctaatggaagtttcgaaattttggtctaatctaaggaagtatgtaagctagaggaaccgatctaatctttgattgatccggtgccgcgcccccggggagagaagattaatctccccgggggcggcacgctgtggaagtggtagaggaacctaggatcggcgtcgtgagactaaccgctctgataccatgtggaaaaatataggatggctgaatattgttttgttgtgtgttgtattgatctaacccttgtaagggtatatataggagtacatgaggggtagaggcttggagtacaagacaagttacatgtggtttaaactaattctatctctatctctttatctctaacttaaacccaattatacttctaacaaagagtaaagagaaacggccatgctacaacttgacactgcttgcccggtgtcaactattctggattaacaccattcatgaaaccattttggcattccatattttgttagcagcttggtaccttaaatcaggtactcatgaaaccattcatgctattgggttaatactaatattttgcacctaaaggctggattttaactttcatgttttaaatttggtgtgctgtacacttggagttggcccatttctggagttgttctcatgctggttgcctgtttctaattttagcttatctctactaatatactactatagtaccatttgacagttaagtttaatgtaatattactaatgagaaactagaacttgataccttcattttggttgatatagtccacttttcagactcttagacttttttttaatctagaatacctttccagactattgacttgtagagacataaccaagctcttgtatttgatgattcacaaattgaaacatgaagaaaattgagcttccttatttactctgcttatgttaatatttaattaggaagctctagcagcggcatttgggaatgggttgtcgacagcttgtgtggtcaacattggtgctcaagttacacaagtagtttgtgttgaggtaataaccatagtacttctatatttctttcaaaccactaagaaatttagatattatcatattaatgtatgatctaccctaaatgtttccaggatggagtagctttaccccacacagctttggcgctcccatatggtggagatgtatgttctcaactgttctctttaacgtagacaaatatatttctgttacttgagcaatctgttgttcatggtcattacatctgtataatttcgtttcatggtagaaatctgctattctattttttcaagttattatctactatcatgcacccagtccatttttctctgtcagaacaacaaatctttgttaggtttcgtctcatgtgactgttgtgtacaaactttatgtcatgccacttttttcccgatcggaagatatgcatattttagttctttcatcatgttcttagtataatagtatcatcttacaaatacgagcaacaatctattcctttcgagtagtttctcagttgagatttggctgtactttggttttgaaaaattatgccactgacattgcaaaggtacggagagtatcatgacaaccagaactcgttggcagtgcacttggcacaacaagtcgtttatggggggcctgaatccttaagtggcaatgagagggagggaaggccccgagagtatatgagcgtgggtgggtgtcaggggtagatttggctttaatatgagaagtggctgaaccattacattgacaatatttccgatgttttttgggactttctgatgacactgattttctaagggcaacctcaatggaatatttctgttaatatcagtcattgtgatgtcaccttagttataacatgattgctgggtggtattgtcgtcagttgtcaagtgctctttttacggaggatctccctcgaggctacaggatagatagtctgatgatcatattcccactttactttgtataattgcatgacttgcttttatggtttttgaacgtcaattgcttgtgatctatattattatttgagagtggatttttagctcccgggtgcctaggcaccctctatgaacagtaaaatcgaaaaaatagaaatcaaaatcaaaaaattctgaaactttgcagcatcaatgatgatgaaactttgtaggtgtttgcaaattttcatgccaaaaaactattcgtggagctctacacacgaaaaagatttcagtgcttgaagttttgagcacttttagcatcaaaatctgaaacttgtttgtacatatttctctacaagatattttggcatgataatttgcaaaaatgtacaaagtttgatcatctttgatgctgcaaagtttcagatttttttatttattttgttttctatttcttttgattttactgttcatagaaggtgcctaggcacctgggtgctgtcacacctttctcttattatttttattatgtttccttttgttacatcctttgctattttcattttcttttgtaggacatatccagatgcctactttgggttcaacaacgtcatcgcacatggccaaattttaaaaccgatcccatgaagaagcctatagatatgctaatgctgaacaagataaaagagggatatagccaaataagggtaagtggcttactctaagctttactaaatcttgatagctcgtatctgtaaaggatttgattgttggacagtctgcttatgttttattttgaaagtttccctgtggaaagaaagatttgtgtcgtccgcgcaaagatcattatagcactgttgtacattgattaatttcacctgaaactgtatacaaagaggataaattgcaataacatatgcatctcctttcgtgcgaatcatttatacacattttctccagtgcatgggactagagcacttctagaatcaatacgttcataagcggaaaccttttctctaaatctctttgtgtatgagcgctgccctatcttgtcaaagcatagtaaattagtagccgaccttgtggcattcatacatggggcataggaagatgaataatctaagatgacttgatagcattggattataatttgccgatgatattgggcatatcccctgtttcttatttatgtgtaggtcgctgaatcctctaggaagaccaagagatctggttggagctatcctatttgcctaagtgctgctcatgtgcatttgtttttagtgttgctacctttccattttcagatccttccttgttgtcctcttagtcatgaagaaatacatttacataagtttcatatatttacatattatatataccaacacagtttgtgtgtgttgaacaaaatgcaaatggacaaaagacaaaactagtatatgtagaaaccagaaagaactggagtcttttagtggatgcttgaacccataacatcctacctactctgaactttatttttcttaattcttaagctgaaatgattattttttgttgaagtagaatgcttcccttgaacttattctagtatttttcttttccgcagagcgggagctatgatgctgtttctgttgttcattcatatgagcatgaaaagtctgttgggcatcagaagacaaggctgtcagctctcagtgtaatttttttaaaccacttattctcttcttcttttgtctattttttgggctgagggtgtgttttgaaaaagtgcatgactttttttgtacttcctccatctcggtttataaggcatgcgcgtcgttctaggttgacaatttaactagctaaatatgtactccctccgtcccaaaataagtgactcaaatttgcactaattttagtacaacgttgagtcatttttgagtcacttattttgggacggagagagtattatatttgatgaaaaatatatgtttagaaactacatcttcttaagaatccaatgatatacttttggtgaaatataagatataactcatatttagctagtcaaattgatgacctagaactgagcgcatgccctgtaaaccgagacggagggcgtatctatttcttctagcaaaaaagtaagacatgcaggcactctccctccctccctcgccccttcactctctattagtaaaatctgtagtggtgattgagttgtagttggagagtaattatatgctgtaggtgatatatctacaaattcaaatttgtttgtgataaaataggttcctcctatggggcttctttatcctcggcttctcattccagaagagttccctccacctccccgaccttggtgagactttgttctctgctttagtgattgtgccctttgatatggtgattgctccagacaagatatgtttatgtttacaggttccaagattgtgatgacatgctggaggatacttggcaaacaaacgacggtctttctggaaatggtggtcttggtgcatgggacagttatcaaatgcttcccaccagagtaaagaagtttgataatatcggtctcgtagaagccattgtcagcagtgttctttcaacaggtagtctctttgcacattatctagcttccctgagagaatcttttctaacaacttcctacaacaggacgtgttgacctccaaaggaagctattctgtagtattcagctggtaaagtatcagtgtcgtttttcatatcaatattgctctatgatgcaagaagcaataattgagaggaatgctctttgcaggttggtggcacagcttcaacagcaggtcttgcaccagttctcgaacaaaggttaattgttacgttcttctggcattatttaacggaagactactggaataactgcgctaaggaatagaagtgtgccaccctatgtagctacaagtgtgccaagcaattgttctgatcctttttgcatttactagttattattaacaagtgtttgttgaaagattttttgtaaagatgaatagcacagagctgctgcaagcctgcaataaaaaaagtgccaatgtggctcctgtgtttttggagaaaatactaatgacacttggattttgtttcaacataatgtcttggaaacgaacaataaatttattgatctatttttcttttctttttgatcagggttcttaatactattccatcgaatcaacccgtcgagaaagttgaggtatgtcttcttgcaaggatatgcatccatatctttttataaattagaatgcacactccatttcttgaaattaacatacctggattgattgtgtgaggtttatatctcagttttacattataccgtaatttagactcgtgatttatttgtcttggcttaacatctcattttaaattcataggtactacaatcaaggaggaatccattgtttatcccatggaaaggtggtgtggtaagtgctatttattttgaatttggctatcatttgttgaagctggtgtgtcttgctcattcctttatgtctgtcctttcttgtgctcttatatttcgggtccctaaatcctactttacgcttggacagattttgggcgtccttgatactagccgtgatgcttggatccatagagaagattggattaaaaatggcgttcacgttgggagtggcagaaaatataaggattcctattttcttcagtcgcaactgatgtgttactacaattcataataggtaatctttcttattgcctgctcagtttctccagattgtatcgttgcatcttcatatagtgttagtgtgttaatatggatgtcaggatatgtatattggatggtctgccctttttttctgtaagatgcacacttaataaaaagttattgtataattgaaggtccggtcctaagagtctgaatatcaaatgagcattgagacacgggatgtgaacatatctgctttttttcttcttaaattttttgaagcttttagttgaaatggttatcgtgcaagctatctatctactgccaaattataagacacataatttgcattttattctgtaggtggtctgcgtaggtgtcgactatcttgagctgcaattgtcggtgtaatctcggatagttgagcaaggcggaacttcatctatgtcgaggtttgtcaagggacatggagaagagatttagatgatgaaggcccgtcttctgcctaccctttcattcagaactagaaatggctagtaaaatacatggagatgagattcatagatttagtggtgccatgtaaacacattctctagtttcagggtgatttactacctgtaacttgtaaattagtaaatcattagtaaaacacaaagcctcttgatgctgttccggattatctaacagtattaatgactgttcagccagattaattatttgttctgagaaggcaaatatgtgcaccggattaa

SEQ ID NO: 76 - DNA, 3081 bp, Solanum lycopersicum
  source 1..3081: mol_type = genomic DNA
tcaacccctttaacgttatagggtaacgcttcatcatcagatccgactttgtcgtttattttcttctttttctcatctttcttaacaaagcactatccatttttcgatttcactcatacacaagcaaattctacctctaaatttaaaattaaaaaaaaaaagaaaaaaagaaaaaaaggtgagaatatgatcacaatcatatatgttctccaattacttaattttattcttcttcattttattattactatatatattgttcttctctagctcaaactctgctagtgcatgtgatctgtgaaatatttttgaattattaattattgcgatttgcatccattattactttcttgaacatgtacctttattgtaagtttagattcgacgtcaatgtattcgttttcccattaggtgactgttgcaatatctttatttgtgcatttccttcattatttatgtgtgtttaacttctcttgaattataattgattggttaatgagattgatattttagaaatccttcttgtgcaaattgaatatgttatgagaaaattttaactatcgtaaatgtgaaactacagtctaatattttgtcaatgtaaatcaacaatatttgagtgagtcattagcatttcttgggatgttaaaggaaagctacaaagaacttggagatcatgaggaaactttgtagtgaaatttatccagcctttgtaaaatactactccttttgtttcaatttatgtgacagttatttgacttgacacaaagtttaaaaataaaagttacttttgatgtctaaaataagttattgatatagaaacgtgtctttgttttttgtagtggctaaaacgtaaattgtgtcaaataaattgagacagaaggagtataggatatatgcaactagattagagcttcatagtgttttttagttgtatgtatgtatcatggaatgttataggatatttttggtattatttgttgctaacatatttgttgttcaatattagtaaaaaatggctgatgttgatgatattcaacctcttgtttgtgacaatggaaccggcatggttaaggtaatgaattgaaccatcaattattaacattttgattgaagaaattcgaaatgtgttctcagctgtagtatgtgtatcttatataggctggttttgctggagatgatgccccaagggcagtttttcctagcattgttggacgtcctcgacatactggagtgatggttggaatggggcagaaggatgcctatgttggagatgaggctcagtcgaaacgtggtattctgacattgaagtatcctattgaacatggtattgttaataactgggatgacatggagaagatttggcatcacactttctacaatgaacttcgagttgctccagaagagcatccagttcttctcactgaggcacctctcaatccaaaggctaatcgtgagaaaatgactcaaatcatgttcgaaacattcaattgccctgcaatgtatgttgcaattcaagctgttctgtctttatatgctagtggtcgtactactggtaagatattcacattctgtacttccttttttctttttttggatgttgttcatgttccaattttctataattaaggatccgttcttactaggaatcagtctcatggatatttgtgacactttttttgatgatttgtttcggagatgtcattagttattactcatgattgtgagtatagatggagaagtgttagaaaagatgaggaaattcatggaatgattttactaacttggtaacaagtgaagaattaatctgtctaggttgttgagcgaaaagcatgataatacataaatcaaatctcaaaagatagttaaagaagacgtaacttgtggtggtttttgaaatgttttgataggcttttacttgatctgagggtctatcgaaaatagactctctatcttccaaggtatggtaagttctgcatacacttcccacgtcccatttgttgttgttggttaagatgaaaagtatatgattcttgtctgccttgtaggtattgttttggattccggagatggtgttagccacacagttcctatctacgaaggttatgcacttcctcacgctatccttcgtcttgaccttgctggtcgtgacctcacagagcatttggcaaagatcctcacagagcgtggatactcattcacaaccagtgctgagaaggaaattgtgagagacatgaaggagaagctgtcatacattgctctagactttgagcaggagttggatatggttaagtcaagcagctctgttgagaaaaactttgagcttccagatggtcaagtgattaccattggagctgagcgtttccgttgcccagaagtgctgttccagccttccacaatcggaatggaagctgctggtatccacgagacaacatacaactccataatgaagtgtgatgttgatatcaggaaggatctgtacgggaacattgtacttagtggtggatccactatgtttcctggtattgctgacagaatgagcaaggagatcaccgcgttagctcctagcagcatgaagattaaggttgttgcgccccctgaaaggaagtacagtgtgtggattggaggttccatcttggcatccctcagtaccttccagcaggtaattaagcatttagtttttcaattagtatactcgttagacgatgaaacgatgctcaaaatatttgtcttctttgaaatgtagatgtggattgcgaaggcagagtttgatgagtctggcccatcaattgtgcataggaaatgtttctaatcggagcaaagataatctgtatctctctgatatcgcgctacgcctatgttctttttgttttgtttcttgatatagcagcttttggatagttattattgctgtcgaactaatttcaggtctctagttttcatttgattgtctgatgattttgtcaaatttcgatatactctttatttcttttatagtccaggaggactaatgtaataagttgttcaactcacttgaagtgtgcttttcattatatgcattgctcaaggaattttgttgtactt

SEQ ID NO: 77 - DNA, 3648 bp, Solanum lycopersicum
  source 1..3648: mol_type = genomic DNA
agagaaggttagaatagagaagaagaagaagaagaaagagagcttttccacattttgcattccctgactgtttgctagtgtgtgcccccccctctctctctcctcatctctctaccaattttctctccgaaaaaaggtacgtttcatctgcatttcattacaatttcaatcgatttttttcgcattttttttcatattgaggtgtaattgatcgattttcgtagtaattattgtgttttcgatccgtagatccgttcatcggtatttttcgcatttttatggtaataatgtttgatattgagttgtaattgatccatttttgtagtaattataatgttttcgatccatagatctgttcatcggaatattttggtgttaattgtttgttgatatgtggaaaatagtatcagaattgaatgagctagcatatttatggattttgtatatatggcatagatattgtttatccatggaaactgaattatttttctcctttttttttatatattgaggtgtgattgatcgatttttgtagtaattattatgtttttgatccatagatctgttaatcggaatattcaggtattggttgttagctgatatatggaaaatagtattaaaattgaattagctagcacatatggcattagatattgttatccatgataggataattgttttttttctttcctttttttctcttaacacggttttctctttgattcctagttccgagaaaaagttataatgcatctgcattttacaatttcaatagccttttctcgcttttttgatctttatatatatgatattgaggtgtaattgatccatttttgtagtaattatgtttttgatccatagatccattcgtattaatcttcccttgttgattatatggaaaatagtatctaagttggatgagcttagaacatgattttgcagtatggcatagatacaagtatccatgaaaacagagttgttctttcttttactaggattttgttggatctgctgagtactttttgagagtttatgtactattgaattaatgtgatgtaactttgtgtgttaactgatgatgtcgtagagttctggaattgctcagcagaagcaaatctaatagtgatatttgtttcaatttgatctgatgatcctagggaaatagaacattacagatgcctttgatgattatcccgtttattctaatgattataacgcactggatttgggggaatatggaatctgaataatgtggtttatttgagtctcattgtagcttttgtgtgaaatagaagctattgagttttatgtgggtaaattttatgaaacttgaagtgcattatgtattatggatcgtgtgcagttataaggcttgcaaaaagctgtacactgtacctattcaacctaataaatgtaaaatccaccaaaaactggtgatggttatatcagttatccattatccatggcaaaccaactttgttagtgtatctcgtgagctgatttaatatgcccaaaatctctgatgctgtgaaacataattctacttatttgttgatgcactgatttatcgatagctataataatatctgtaattgttaacatactattattcaatttatgtgcggagcctttactttgtcatccgtgcaaagagagaatatatttctcggaagactgaaaaaatagaggttcgaagtaataggaacctttgactgaaggaatagtatatgaacatctcataaggtgtattctaatatgtgggactttctgtgttcagcttatttaaacttgtttgttatttacaaatagcgaaaactcgtataaggaataaagatatcagtatcagatgataattttttggacatatacatttcttactgtggtttcgtttttcaatgcaggaatagcataagatggcagacggagaggatattcagccccttgtctgtgacaatggaactggaatggtcaaggtaagctccagtgttttgtactacagcagagttgacctgccatttttttactgatgcttattaccttttggcccattctgtttagaaaattaagagattcttatattggtttattatctaggctgggttcgcaggagatgatgctccacgagctgtatttcctagtattgttggccgcccccgccatactggtgtgatggtgggtatgggtcaaaaagacgcctatgtgggagatgaagctcaatcgaagagaggtattttaactcttaaatacccaattgagcacggaattgtcagcaattgggatgatatggagaagatatggcatcatactttctacaatgagcttcgtgttgcccctgaggagcatcctgtcctcctaactgaagcccctcttaacccaaaggctaatcgtgaaaagatgacccagattatgtttgagactttcaataccccagctatgtatgttgctattcaggctgtactctcactgtatgccagtggtcgtaccaccggtaagaaaattttcattctttattagcataattactttatatgactgacatctctcaactttcttgatgcttctaccttgtaaagatcttgcacttatatgatgctttgtggatatatttacttattataagttacaaccttctaattttgacatgattgttatcaattgagttattacttctaattctttttcttctccacaggtattgtgttggactctggtgatggtgtcagccacactgtcccaatttatgaagggtatgcccttccacatgccattctccgtcttgacttggcaggacgtgacctcactgatagtttgatgaagatcctgaccgagcgtggttactcgttcaccacctcagctgagcgagaaattgtcagggacgtgaaagaaaagctcgcttacatagctcttgactatgaacaggaactcgagacttcaaagaccagctcttctgttgagaagagctatgagctcccagatgggcaggtgatcaccattggtgctgagcgtttccggtgtcctgaggtccttttccaaccttcaatgattggaatggaagctgcaggaatccacgagactacatacaactctatcatgaaatgtgacgtggatattaggaaagatctttatggaaacattgtgctcagtggtggtactaccatgttcccaggtattgctgatagaatgagcaaagaaattactgcattggctcctagcagcatgaagattaaggtggtcgctccaccagagaggaaatacagtgtctggattggaggctctatcttggcttccctcagcaccttccagcaggtttgcattgtcccttctgcctattataactttgctgttattttgggtgtctatcctacttagaagtttgacagttactgacggtgttttctgcttctcttattttctgtagatgtggattgcaaaggcagagtatgacgaatctggtccctctattgtccacaggaagtgcttctaatttttccaagattgacaatgttggtgaaaggaaaagacttcttatttcctactggaccagagatgcaattgtagtgttatattctggctttattttctgtatttttgttctcatgttggattgatgatattgagagggcaaaggagttaattgttgggttatgt

SEQ ID NO: 78 - DNA, 3670 bp, Solanum lycopersicum
  source 1..3670: mol_type = genomic DNA
aacagaaattggaatttgagcctcattttaagctcaattttcatttgttattaacatatacttttcccactttcgaaaaaaacaagaaacaaaggagcaacaaatactattttttgtgaaagtttcattaaaggtacaatctttactattgaatcttgatctttttattatgcacagtacatgtttgtggatattcctctataaagattgattctttggtgaaagaattttgtgggtgtcatttcttttggattgatcttttgatttggtggtctatgtgagtttaagatctttattattgtcaatcaatgtttgtggatgttgttttttaaataaagattgatactttggaggaagaatattctgggtgtcatttctttgatattttgatttggtggtgtgtgtgattttaaatatcttatagtcaatccatgtttgtgaatgtttgataacttggagaaataattttgtggttctcgaacctatgttgctcggattctttaaaaatgttgaagggtgtaattttggaggatccaacattgatgggacaatatttttgcagagtccaacattttcctctttttggattgatcatttagtttggtggtgtatgtgattttataatcattcttattctcaatcaatttttgtggttatttgctaataaagattgataatttggaaaaataattgtggtttacggatccatgttgctcggattcttcaaaaattgttgaagtgtgtttgtcgaatcctccaaaagtagtgtattttttgaggatccaaaacacgagtgcggcaacattttaggagagtacaagcaaccatttttctctttttggattgattgatttggtaatgtatgtgattctaaatctctctcattctcaataatggcggtgaatatttcttaataaagattgttaatttggagaaagaatcttattatttcctcctacgttgcttggactcttcaaaaatgttgaagggtgtgtgtcggatcctccaaaagtagtgtatttttggaggatccaacacaggcacgacaacatttctggagagtccaagcacctttttccttttctttggattgatcattgatttggttagtgtatgtggtaattttcatccttcttgtttgttgatttattttgcttgaaaaggataatagtttgactgttgaaggtggattgttcgatctgaaaatgggtatcttccatttgagtgaaatgtcaaaagctagaaatcattttatttaattgcttttggtttgttttttcttttcccattctttttggtagatctattttctttcaatctgttctttcaaagatatactattgattaagcttgcacctcaattggcatttccgttattttttatttttgaaatttttttttataacataaatatgatgtaatccaatcatatgatttcatccaatcaaattgcatgagatctttatatgttacagaaccattattctgttggagataaatgaaagagcttagctctatttattgctattgttctgtggattaggattttctcacttattgtggtgtttgatcttcgatattacacgaaatctatgtacgtttttggttttagtgacatgaatatattgttatctaattccagaacacataaaagatggcagaaggtgaggatattcagcctcttgtctgtgacaatggaacaggaatggttaaggtaactatgatatttcactggattctcctgaacttttggtctcattaaagatggcattggccttatttgttctgaatactgactgtgaatcttgtcttgaaattgttaggctggatttgctggagatgatgctccaagggctgtcttccctagtattgtgggacgtcctcgtcacactggtgtgatggttggcatgggccagaaagatgcctatgttggtgacgaggctcaatccaaaaggggtattttgactttgaagtatccgattgaacatggtattgttagcaattgggatgacatggagaagatttggcatcataccttttacaatgaacttcgtgtggctccagaggagcacccagttctcctcacagaagctcctcttaacccaaaagccaatcgagagaagatgactcagatcatgtttgaaaccttcaacacccctgccatgtatgttgccatccaggctgttctttccctctatgccagtggacgtacaactggtaagctctgccttcgctcaaccacttacaaatatttttgtcgaatgcgcgaaaccagcatttccactgaagtataaggttgattatttgttgaaacattgtgttgagtcctgtttattaggtaaaacagaattagtgaaaacatattacttattaagttatttcgtgttcctcaatataaaatcatgcgtctgactgtggattttctttttatgccaggtattgtgctggactctggagatggtgtcagccacacagttcccatctatgaaggttatgccctcccacacgccatcctgcgtcttgatcttgcagggcgtgatctcacagatcacctcatgaagatcctcacagaacgaggctactctttcaccaccacagccgagcgggaaattgttagggatgtgaaggagaagttgtcttacattgctcttgactatgaacaggaaattgaaacagcaaagaccagctcatctgttgagaagagctatgagcttcctgatggacaggttatcaccattggtgctgagcgattccgctgtccagaagtgctgttccaaccatcaatgatcggaatggaagctgctggtattcatgaaaccacgtacaattccatcatgaagtgtgacgttgatatcaggaaggatctgtatggaaacatcgtcctcagtggtggtaccacaatgttccctggtattgctgataggatgagcaaggaaattactgcattagctcctagtagcatgaagatcaaggttgtcgccccacctgagaggaagtacagtgtctggatcggaggatctattttggcctccctcagcacattccagcaggtacgtaaaatctatcaactttttgtggtctgattcatttcaaagttgcacatcttaaagcttattcactatcttcataagcagtagattgctttaacataaaaaccaatttgcttctatgactttactatgtttgagaaatttgaattatctgagagcaaatgctaaccaacccttcctatgctaaatgctgaactctttcaaaggaatgtgatgaacagttgtcaaggacgcgtaagatatttacttacgagatttcttttttcatggtacagatgtggatagctaaggcagagtatgatgaatctggaccttcaatcgttcacaggaaatgcttctaaatacagcacgtcgagtaagagataagtgaagaaatatacaaacttgcatttccagagcagctccctgtcgattggttgcatataatatgcttctcatttgtatttccttttgatttatttttgtttcaatctcaaatatttggtcattggtatgattaaaaaaaaagaatgtcaatttaccattaatatttttatgtagaagagttgtatttcaaaaatgttgtgatttggattatggataaaaagctttgttgattcattttatgtatacttttggtc

SEQ ID NO: 79 - DNA, 2581 bp, Solanum lycopersicum
  source 1..2581: mol_type = genomic DNA
tgtcttaactcattcatcctcttccagactgtagagagagaaagcaagtcggccacaagtcatcatccgtttgcctttgcttttcagatccattttcatttccttttcggtaatctaacctatcttcttcatcagatcttgctttatttacttgcttcttttctttcaatttctgctttgagatctgctctacttactcatgttgaatcgctgctttttgttcttctgattactctactgctctaattacttagtaaaacttagatttaggtgtgatattctctttgatttttccagatctgttgtttttatggtcaatctgtcatgaacttgatctgctcttaattttcctagatctactgtgttattagtacttgatctctgcatactcattttggttaccagcaaatttagctaaactttgatggatctttttttttggctgctatacggaaaaacgaagcatgtttttattattacaagtgtccgcctgttgactgagctccaaattgtctgggatttagatatatcagtttacttactaacaagtaaaaccttatatgactagagacatttagttgagttctgaatcgatcttatgatgttgtgttatgtgttgataccttcatgtatatgtttaggttagactaagtgtgctgatttaacttgcttttactttcagttgattaaaaatggccgacggtgaggatattcagccccttgtttgtgacaatggaactggaatggttaaggtagtccttgttcattgactattgtttttacaggaagcacttgtcatttataaccattttaatttaagccaattgcatatcctttttatggaatgatttgtgttttgaaatgtaggcaggatttgctggtgatgatgctcctcgagcagtgtttcccagtattgtgggtcgtcccaggcacacaggtgttatggtcggaatgggacagaaggatgcgtatgtgggtgatgaagctcaatctaagagaggtatcttgaccttgaaatatcccattgagcatggtatagtcagcaattgggatgatatggagaagatatggcatcatactttttacaatgagcttcgagttgctcctgaggaacaccctgttctcctgactgaggcaccccttaatcccaaggccaacagagagaagatgacccagattatgtttgagacatttaatgttcctgctatgtatgttgctatccaggctgtgctttctctgtatgctagcggtcgtaccactggttcgtactgggctttttgtgatccaactttgtctgcccaatgaaataactcactctgttttaattttgacttaatatattacttttgacaggtattgtgttggactctggtgatggtgttagtcacactgtccctatctatgaaggttatgctttaccacatgccattcttcgtttggaccttgctggtcgtgaccttactgatagcttgatgaagatcctcaccgagagaggttacatgttcaccactactgctgaacgggaaattgtacgtgacatgaaggaaaagcttgcttatgtggctcttgactacgagcaggaacttgaaaccgctaggagcagttcctccattgaaaagaactatgagttgccagatggacaggttattaccattggtgctgagaggttccgttgcccagaggtactcttccaaccatcaatgattggaatggaagctgcgggtatccatgagactacatacaactccatcatgaaatgtgatgtagatattaggaaggacctctatggtaacattgttctcagtggtggctccaccatgttccctggtattgctgatcggatgagcaaggaaatcactgctttggctccaagcagcatgaaaattaaggttgttgcaccacctgagaggaagtacagtgtctggattggaggatccattcttgcatccctcagcacattccagcaggtgagcttttgttcttctttgcgttaatttttttccagtacaaattacattagctagttggactaaatatttgttatctttgtgcttgatcagatgtggatctcaaagggcgagtatgatgagtctggtccttccattgtccacagaaagtgcttctaaggtgctgctataattacttaaaagtgcgagtgtcctgtctgtttcccggttttgctattatgttgccagtcaatttgtttttttgatgggatggagaagtttggtggtgggggctatgaatgcacggtagcaaacaacagattgccagtattatctcatgtttccatttaatgtggttaatattctctacatacttgagaggtgcctgatgcattgccctcttctgtctggctacaccatcccttggtcgaagcgtctcttttttaggttgtttgtagttgaaggagagtgattgtgatgttttctcctcgtcttttctctcattttctccttttatctgattttgcacttttgtggttcttttttttcttggacccaataatgtcaatatttattgaatgagaaaattcctatatcatatcagtttgaggaaatcattactatttgtgtggata

SEQ ID NO: 80 - DNA, 1662 bp, Solanum lycopersicum
  source 1..1662: mol_type = genomic DNA
ttttttagcttttaaaaagaagaccatttcattgccttttggaatcgttgagtttcatttcaattttgctttgttgattcttttttttctttttgaaaaaaaaaatattgtatttgcactcacaacccaacagtttattcccctctcccgaaaaggtaatctcgacgaatttagaattatatgaaaatgattcaatatcgtgtttattaatcgtttagtgtttggcatgaatttagaatttaaaattgtatgagaatgattcaaaatcgtgtctatggatattgtagattaaacaatggcagatggtgaggatattcagccactggtgtgtgataatggaacgggaatggtgaaggtaagtagagagaaagaaattttttgaaatttgagatttgaaattgagaaactggtaattttttctaggctggatttgctggagacgatgcgccacgagcagtgtttcctagcattgttggtagaccacgtcacacgggtgttatggttggtatgggtcaaaaagatgcgtatgttggtgatgaagctcaatcgaaacgtggtattctatctttgaaatatccaattgagcatgggattgtaagtaattgggacgatatggagaaaatatggcatcatacattctacaacgaacttcgagtggctccagaggaacaccctgttcttctcacagaggcacctctaaaccctaaggcgaatcgcgaaaagatgactcaaatcatgtttgagaccttcaacgcgcctgcaatgtatgtcgcgattcaagccgtactatctctatatgccagtgggcgtacaacagggattgtcatggactctggggatggggtgagtcacacggtaccaatctatgagggatatgctctaccacatgctatccttcgtctcgatttagctggacgggacctgacggatcacctgatgaagatcttgacagagcgtgggtactcgttcacaacaagtgctgaaagagaaatcgtgagggatgtgaaggaaaagctatcttacatagctctcgactatgaacaagagattgaaacctcaaaaactagctcaaacgtggagaagagctacgagttgcctgatggtcaagtgattacgattggtgctgaacgtttcagatgccctgaagtgctgttccagccttccatgatcggaatggaagctgctgggatacatgaaacaacgtacaactccatcatgaaatgtgacgttgatatcaggaaggatctttatggtaacattgtacttagcggggggacgactatgtttccaggaatcgctgatagaatgagcaaagaaatcacagcattggctccaagtagcatgaaaattaaggtggttgcaccaccagagaggaagtatagtgtttggattggaggttcaattttggcttctttaagtaccttccaacaggtaacgttgatcatttattctctttttaacttcttcacatctaaaaatattaattttatgtttgttttttgaaatgtagatgtggattgcaaaggcagaatatgatgaatctggtccatccattgtgcatagaaaatgcttctaaattattcctttttagacatgtaattcctcatgtaacaatcaatggcaaataaattttacagtaaaaccaattttcttggttctcaa

SEQ ID NO: 81 - DNA, 2700 bp, Solanum lycopersicum
  source 1..2700: mol_type = genomic DNA
gaagcctgattagtcaaaggaaaaactagaggataggcaagattatagacagcaaaaaatgcggttcatttccaccattaatgttgcaaatataacaaatttctgctttaaagtttgagttttatctccttattcttcctcagttttttctccttttgtttcttctgtatatttgaattctagcctactattccaggacctccaccacccaaaaatatttaaagtaataatctcttttcctatgaatttttgtcttgtaattggtttcattttttaatcttgagcatttcaatttcggtgataggtattcgataaaaaaaaatggcagatggtgaggatatccagccactcgtctgtgataatggtactggaatggttaaggtacgatatacttgaaacacatttttaaattttggaaacatttattaaaattcaattctattaagttgtgaaattaggtctttaagcctaactccgtgggacttttgtcattctttaactgttctgataccatttgaaaccccaaaagctagctcgaatggacttttgtcattctcgaagggacttttgtcataagcctaacacacactccaaaagctagctcgaagagaagatgattgtccaaacctcataaggacaccactcatctcattaatcaccaatgtgagacttttgtcattgtgctcctttttttcagttatagggcggagagagggaggcaactgaaacttttagagtcgagtttacgctctttcctcctctttcgataagcttttcatagccatagtcgtactcaagtacccttgcaggggaatccacttctgagatggagagaatcccgggatgcatatgctcttttcagggttgaaggaattaatctgaaaggatagactagcaaactttcggaattgagagaagcactttacgcatatttagtgcagggtatctctggaacaacacctatttgatttttggccatcttaacaaaaatgtgtagctaaaatttctacatgacaaatgtatgataaacttggctggattaataggatttgatggacaatttctacctgtttgtgaaaacactagataacgaatttaatagcgattcaccaaaataatttatggagatctttttaaccacaaatctgatttgtaaattgagtgatctcatatgatggtgcaaatgctgccatattttgtatttctgtgagacatttgccaattctatgtgatttttataggctggatttgctggagatgatgctccaagagcagtatttcctagcattgttggtcgccctcgtcatacaggagtgatggtaggaatggggcaaaaagatgcatatgtaggagatgaagctcaatccaaacggggtattctcacattgaaatacccaattgagcacggtattgttagcaattgggatgatatggagaaaatttggcatcatactttttacaatgaacttcgtgtcgcaccagaggaacaccctgtacttctcaccgaagcacctcttaaccccaaggctaatcgtgagaagatgacccaaatcatgttcgagacattcaatactcctgctatgtatgtggccattcaagctgttctatcactttatgccagtggtcgtacaacaggtgaagcaaaatctctactattttcatttattccactcttgtgttagtaggacctaacacaacattcaatctcaaatgtaggtattgtgatggattctggtgatggtgttagtcacactgtacccatctatgaaggatatgctttaccacatgctattttacgtcttgatttggctggtcgtgaccttactgatcacttgatgaaaatcctgacggagcgtggttactcatttaccactacagcagaaagggaaattgtgagggatgttaaggaaaagctctcatacattgctcttgattatgagcaagaattggatacatcaaacactaattcttctgttgagaagagttatgagttgcctgatggtcaggttattacaattggtgctgagcgtttccgttgccctgaagtacttttccagccttcaatgattggaatggaagctgctgggattcatgaaacaacgtataattcaatcatgaagtgtgatgtcgacattagaaaggatctctatggaaacatcgtactcagtggtggtacgactatgttcactggaatcgctgatagaatgagcaaagaaattactgcattggctccaagcagcatgaaaattaaggtggttgctccacctgaaaggaagtatagtgtttggattggaggctctattttagcttctctaagtaccttccaacaggttagtaaaaactcagttatggtttgcttgcttctgttatagatttgatttaccatttgtttgttatagacaagtctgactgtgtattgaaatgcagatgtggattgcaaaggcagagtacgatgaatctggcccttccatcgtccacaggaaatgcttctaattgtttagacatgttactctgttgttataaccaaaggcaaacaattttgccagattttcatataatgaaactttgcccttttaattgtaactcgaaaactcttctgattatatctgtatataacatgcagaaatatagtatgcatcctctttcattttaccacagtaacaatcttgctcgaatttattggcaattattgtttcctaa

SEQ ID NO: 82 - DNA, 1481 bp, Solanum lycopersicum
  source 1..1481: mol_type = genomic DNA
atggctgatggtgaagacattcaacctcttgtttgcgacaatggaactggaatggttaaggtgtgtcattctttctctctgttttttttgacaaaagttttcatctttttttcaatttttgattgatgatcctatgaacaatgtagcatttgtttttttttgtttaagatgatgatgttcttttgtattggaataggctggttttgctggggatgatgcacctagagctgtgtttcctagtattgtgggtcgtcctcgtcacaccggtgtgatggttgggatggggcaaaaggatgcttatgttggcgatgaagctcaatccaaacgaggtattttaactctcaagtaccctattgagcatggaattgtcaacaattgggatgacatggagaagatttggcatcacactttctacaatgagctccgtgttgctcctgaggaacatcctattctacttaccgaggcaccgcttaacccgaaagctaatcgtgagaagatgactcaaatcatgtttgagactttcaatgcccctgctatgtatgtggctattcaggctgttctttctctttatgccagtggtcgtactaccggtgagtgtagcgcttttgtgtccttatggtgtatagcttcgatctttgtacatttttgcagagcaaaacataaagcctttcttgaattgtggatgtgcaggtattgtgctcgactctggagatggtgtgagccacactgttcctatctatgaggggtatgcacttccacatgctatcctacgtcttgatcttgctggtcgtgacctcacggatgcgctgatgaagatcctaaccgagcgtggttactctttcaccaccacagcagagcgtgaaattgtcagagacataaaggagaagctttgctacattgctcttgactacgagcaggaactcgagacagccaaaaccagctcatctgttgagaagaactacgagctacctgatgggcaagtgatcaccattggatcagagcgattccgttgtcctgaggttctttaccagccatctatgattggtatggagaatgctggtatccatgaaaccacctataactccataatgaagtgtgatgtcgacatcaggaaggacttgtacggtaacattgtgctcagtggtggaaccacaatgttccctggaatcgccgacagaatgagcaaagagatcactgctttggctccaagcagcatgaagatcaaagtcgttgcccctccagagaggaaatactctgtctggattggagggtccatcttggcctccctcagtaccttccagcaggtacacacagtcccatcacttgtttactctaaacagacctaaactaaatcctaatcactctcagcttaactaaactggttcaattctgaaactatgtgttaccttgtgcagatgtggatcgcaaaggcagagtatgacgagtcaggtccatcgattgttcacaggaagtgcttctga

SEQ ID NO: 83 - DNA, 2809 bp, Solanum lycopersicum
  source 1..2809: mol_type = genomic DNA
atccttgtagttggcagccaaaaacatgccatacttttcaccgctttaaatacagaaaaccgctactatttctttcttcattttcaacaacgcctctttcttctctctataactataatcatcaactggtacttcactattttctatctgtccttacgtttgatgcaaagaattctgtttcttggtcctgttttcagttgattgattgataaatttgatcaacatctgtaattcaatttgtagacagtggttgtggatctcttttgaacaaggctacttcttcttagttgatcagaaaattgagtgattaatagaattcttgaagcgtaggttgttgtgtcttttttctttttaatatatatagtacatgctcttacttgctaatatatggaaagttttgattagtattgttacaagtttaatttgatcaagatctgtacttcaatttgtgataccaacttgacgctgggtgtttaggtttatctttatgaatcaaagttactactttaatttcttcatcctcgagaagggtagttcttagttgatcttcatattcaagattgggcttgaggcttagctattgagttgattaaatatagttcttactattgtgtgtcttcttcttttttatacacagtatatgcgtggcctgtaaaatctaatcattattaatttcatcttttctcactatttttccatcttttgataggttttaaaagatggcagatgcagaagatattcaaccccttgtctgtgataatggaactggaatggtcaaggttagtttatgattaagctctgaagctatcagaattcagaacaagtcttttggttgtattgactgtaaattagcataataatatcttatatttcaaacggatcttttggtacccattggtttgagctgttaaagctgtgcacccttgtaattcaaatttaaattatggttcagatggttgggagtatttgtactacttcctttaattaatggctcttttgacctattttcacgcaggctggatttgctggtgatgatgcaccaagggctgtttttcctagtattgttggtcgacctagacacaccggtgttatggtagggatgggtcaaaaggatgcatatgttggtgatgaagctcagtcaaaaaggggtattctcaccttaaagtatcccattgagcatggaatagtaagcaactgggatgatatggagaagatttggcatcataccttttacaatgaattgcgtgtttctcctgatgagcaccctgtgctacttacagaagcacccttgaaccccaaggccaatagagagaaaatgacacagataatgtttgagacattcaatgtcccagccatgtatgttgctattcaggcggttttgtctctatacgccagtggccgtacaacaggtgcaacatgagtcttacccttcttttacaactaaagttctaattagtagattgataatttaacagtcagcatcaattgcactattgtttaaatgactttttaaacgattcagacatggagagaagtctggcgatcttgacttcattcgagcttttagttcttatggatggttctgatgtagttcaatatgtgtttcctctttgaggagatactgcctgtgattgttgccatattaatggttttctttgaatcttcaagttatccctttctaaatatgctattggccatctcaacaggtattgtcctggattctggtgatggtgtcagtcatacagtgccaatttatgaaggttatgcccttcctcacgcaattcttcgattggatctagccgggcgtgatcttactgactgtctgatgaaaatcctgactgaaagaggttattcattcaccactagtgctgaacgggaaattgtgcgcgacatgaaagagaaactagcatatgttgcacttgactatgagcaagaattggagaccgccaggagtagctcagctgttgaaaaaagctatgagttaccagatggtcaggtgattaccattggagcagagaggttcagatgcccggaagtcttatttcagccgtcacttgtgggaatggaagctgctggaatccatgaaacaacttacaattccatcatgaagtgcgatgtagatatcagaaaggatctttatggcaacattgtcctcagtggtggaacaacaatgtttcctggtattgctgatcgtatgagcaaggaaattaccgctcttgctcccagcagtatgaaaatcaaggtagtggcgcctcctgaacggaagtacagtgtctggattggagggtctatcttagcttctctcagcaccttccaacaggtaataaatgacataacaacctataccatacactattacagacgtttcctcaaaactcttgccttgtagtgttgtatgtattttagctgggattgttgctgattttgtttctttgaactaatgcagatgtggattacgaagggtgaatatgatgaatctggcccttccattgtccaccgtaaatgcttctaagctgatcgatgaacggagttcaatcttctcatgatctgcttcaacagttcggtcgtagttctgagcaggagtttgtttaagttggaatgtttttttgagtttcataaagatgaaggtttatactgtgcgataatagggtgtaagcttttagattgtacccaatcttttcttaatgtcatttgagtgtttagaggtgatttctttcctccttgcttttaatttccttgttcttctgtatttttggattgttttttctgtgtataccgagtaatataatgtcagttcatggtttagaaa

SEQ ID NO: 84 - DNA, 3081 bp, Solanum lycopersicum; identical to SEQ ID NO: 76
  source 1..3081: mol_type = genomic DNA

SEQ ID NO: 85 - DNA, 3103 bp, Solanum lycopersicum
  source 1..3103: mol_type = genomic DNA
agaagatgcttagagtttcgaattattgattctctgttttttcaaataaaataaaataaaactttctgccaaaaatcctctgttttctcagaagaactctatactgaattagcaaccaatttcctccaaaggtaagttttaatactgcttcataatttatttgaagttgagttgtttttgttttactttttggactcagcttttattctttcgagtcaggatttgaactttatgtgttctgaatacgattttttgtacatgcttgtcaatattgacatggctatggcctatgtgtttttgatattttttttatggatgaagtacttcaactatttgtttgtgtaaccagttaacacagtttttggtgtttcagattcacttttgacacttggttaggttgatttcatgtggttctgatggattttttaagtatgtttcgttgggaacaagtgatgttattgaattagtatggcttgttcttttttgttttgttaaagaaaaatagccaacaagtgctacattgatttgattagaacgtaatttctgtgatcggtagagttctcttaagtgataactaatccgggactaattgaggttgaatttgtcatcaatgataaccaatatcgggataacttgttccccaaccaaatgagtcctaagattactatttgcgaggctaacattctttgtcttaacaagatttatcatttctacctacagaatgcaatctgagtggatccataaatatatatatgccactatttgcaatgagcacgcggtagtctttaacaaaacgtgaaagaatagtttagcaatgttctcattgcgtaacatattgcatgttcagtttgttcactactcattttgtttcgtgttttctcaaccttagtacagcaaatcctttatgaatgtgaattcgtcctgtgcaactagagaactagtaagtactagcaattctttagcattttgctctttctttccatcgagagaatgggaacttagaaatcttggaaaatggatatgcttttgtagagtattgaggagatatgtcgataagaaactggcaactgaatagtatgtaatagtaacggaacttatcttgagttaaatggattttatgtttcactattatcatatcttggtgtttaggcttaatgtgtcgtaataattgcatgaatgaactaccactgcacaaattgacacctcttattcctttcatgtgttgttaaatttgcatgattcccctactacttgtgccactctgtttgtgatttcaatattagtctatctcacctcgagtttgagtctattacacaaagtaagagactcctacacaaaaactttcacataattgactttatactttggacatcttttacattgattaggtgtttgtactagtgatgtattacctcaattttacttatgtatagcgtttataagatggctgatggagaagatattcaaccacttgtagttgacaatggaactggaatggtcaaggttggttagcaaaaactgcttgcgattcttgttactctatatatagctatgtgactttactgatgtacaacaactatgttatttatttctttaggccggttttgctggggatgatgctccaagagctgtttttccaagtatagttggtcgtcctcgttacacaggtgtcatggttggaatgggacaaaaagatgcctatgttggtgatgaagctcagtccaaaagaggtattttgactctgaagtatccaattcgacatggtatagtagacaactgggatgatatggagaaaatctggcatcacaatttttacaatgagctccgagttgctcctgaggagcattccattcttttgactgaggcaccacttaaccctaaggcaaaccgagagaaaatgactcaaatcatgtttgagacattcaatgtgccagccatgtatattgcaatccaggctgttctatctctttatgctagtggtcgtacaactggtaagcagcaagtattgattaggaacgcatactagttctttttggctttctgtcactaatttgcttgctttttttaccaacaaggtattgtgcttgattctggtgatggtgtgacccacactgtccctatctatgagggatatgcacttccccatgctatcttgcggttagatcttgctggtcgtgatcttacagattacctcatgatgattctcacagagagaggttattcattcaccactgctgctgaacgggagattgttcgtgatgtgaaggagaagcttgcgtatgtcgcactggattatgaacaggagcttgagactacaaagaacggtaaggatgttgagaagagttacgaacttccagatgggcaaatagtcactattggtgctgagaggttccgttgccctgaagtcctattccagccatcattgattggaatggaagcagttggaattcatgaaacaacatatagctcaatcatgaagtgtgatgtggatattagaagagatttatatggaaacgttgtgcttagtggtggctcaactatgttccctggcataacggatcgtatgagcaaggaaatcactgctcttgctccaagcagcatgaagatcaaagtcgttgcaccacctgaaaggaagtacagcgtctggattggaggatcaattctagcttccctcagtactttccaacaagttggtctctttttccctctctttgattgaataacagatacgtcttaatctcgaaaataattgattctcttctatatattttgctaacttgtacttgttttgcagatgtggataacgaaggccgagtatgatgaatctggtccagcaattgtccataggaagtgcttctaagagtggttgtgttaactttagtttgtttatcaaatgaattctgtgtcaagaattcttgcgtttcgtgtaattttaatttgtctggtaacactttttatgttattgattcttgttcaggtctttctactgtgaatttaacctcaaagcaaattgtattacataataattaatgaatcacaatataacagagtcccttttgttaggaagaggttgtaccctcaatttatgacttttcagcgtgaa

SEQ ID NO: 86 - DNA, 1890 bp, Solanum lycopersicum
  source 1..1890: mol_type = genomic DNA
gctaatcgcgagaaaatgactcagataatgtttgaaacattcaatgtatgctattcaagttgttctgtctttgtatgctagtggacgtactactggtaagatatattaactctctttgtttcgaatgttaatttgcctttcatgttgctatgttttcttcctctatcgttttttcccttttcataatgatttgctgcacttcagtcaaaggtacttcgagatgtaaatagtgaattgtagtcaaatatgattcatgttttctagcaggtattgtgttggattctggagatggtgtgagccatacagttcctatctctgaaggttatgcactacctcatgtagaccttgctggccgtgaccttactgagtacatggtgaagattcttactgaacgcggatactccttcactactagtgcagagaaggaaattgtaatggatatgaaggagaaattggcataacttgctcttgatttcgagcaggaacttgagacaaccaagacaggctccgcggttgagaagaactatgaactgcctgatgaacaagtgattactattggtgctgagcgttttcgatgtcctaaagtactttatcagccttctttgatcagaatggaagttgctggaattcatgagacgacgtataattctataatgaagtgtgatgttgatatcagaaaggatttgtatgggaacattgtgcttagcggtggatcgactatgtttcctggcattgctgatagaatgagcaaagagatttaagcctcagtggttgctccccctgaaaaggaagtatagtgtttggattggaggttccattttggcatcccttagtacctttcaacaggtgattatattccttttgctatttttattggctcgactaatctggattcatgccgtaaaaccccaccactacggagggtcttacatgacctagcatagaggggcatttccttcatttgtttgggtttaataaactagttcccgaaatctagtagctcgactaattttgatttgcgtcatcaaaatcttagtataggggaggttttcacaccttatcaaaatggagcattttccttcccaaaacctacactagctcaactaattcggattcacgctgtaaaagaggacttacccgccctaccgactaccaaagaggggtattttcctcttcttttttttgggcttaatcatcaggtttccaaagcatactccttcaactaatctagattctccgtagagctatgttgctcagactccaaaaaggaggatgcattcatgtcaaatccttaaaaaaagtgcactacttttgaaggatcggactcacactcgtccacatttttgaaaggttcaagcaacttagtggtaaaaaacccaatatggagggttttacctgctcaatagaaaaggggcattttcctccctatttatggtttaaccaccagttcctgaaacctactgactcgactaatttggattcgggccataaaaaacctaccatgggcttttttggcctcgatgagcatttttcttcattgttatttatacatgtgtatttgatttatttatctttatgttgataataatgatgattaacatacttatcattgtttgaatttgtagatgtggattgctaaggcagagtatgatgagtcttgcccctccaatgtgcatagaaagtgtttctaatccgaacaaaggttgaacctggttcaacatttgagttttcgatcttctttttgtttccttggtgactcgaaccaataacttttaaattctaaacgaatgatacttaccatttgaacaagccttcttgttacttttagagaattaattggtcattggacctttttctttttttttgtttaattcgttacttactaggagt

SEQ ID NO: 87 - DNA, 2924 bp, Solanum lycopersicum
  source 1..2924: mol_type = genomic DNA
ttttttgtatataataagcttcccctagagtcttaagattcctcattttgtatatctcgtttccccaaacagagtcttcgaagccgccggccataatctccggttgctttgctaaatctacggtgaccactttccgatctcctctcagttcccggtaagtcaagatctggtctttcttattcgtttttttttgattttttgatggattgagctatgtgaaaatgtaaagaaaattgtgagatgcatgtggggattatgttttgagatctatggaagtggtaaaagagattgaatttgtttatctgaaatgggtattttttatattttggattgactagttagatgtagtgaatcaagtatttgaaggttgagctaatataattctggatctgatgaagtggatctatgttgaggttgatctgctatggatttgccttgatctactgtttgattatagttcaaatggttttgaatggtgttctgtagctctcttatggtgattgatgaataaattttgttaaaaatagaagaaaaaagccttctttttcgttggaactgaaattgattatgtccttttggctttttgattactttgtatctcaatgagatgtagcttagttgaaaatgagtgtggagtgactgaggggttttgcttttttgtctccgattggatcgaggagaagtaagttatagagcgagaagtacgtgatgcagtgtcatttggatttactggattgatagttgaatcatagagttttaagatattttcacttttgatttccctcttttatctatgttgggatgttgattgccaagtatccaatgtattgtcattttgatatgcttgatcgataggttttgacgtccgagttttaagatacatctgtattgggatattgtcttatctgtaaatcatctacctatgttgctgactaggtatctggactggatttagaattgcttattaatccgttgtttgtattggcagttgaatagaaaatggctgacggtgaggatattcagccccttgtttgtgacaatggaactggaatggtgaaggtcagtctttattttttttactttggtttacaattaccgactcacggtagttgaacaacgtgttctgttatattcttgagatgtttctgatttttttggtgaataattggattgtttgaatgtaggctggatttgctggtgatgatgcccctagagcagtgtttcctagcattgttggtcgtcctcgccacactggtgttatggttggaatgggtcagaaagatgcatatgttggtgatgaagctcaatccaagaggggtatcttgaccttgaaatacccaattgaacacggtattgtcagcaactgggatgatatggagaagatctggcatcatactttctacaatgagcttcgtgttgcccccgaggagcaccctgttctgcttactgaagcacctctcaaccctaaggccaacagagagaaaatgacccagattatgtttgagaccttcaacgttccagctatgtatgttgctattcaggctgtgctttccttgtatgctagtggtcgtacaactggttagtattagtactctcatgatccgaatcttcccttgttggaaagttgtttttgatctgacattatgagtgtcttttgacaggtattgtgttggactctggtgatggtgtgagtcacactgtccctatttacgagggttatgctttgccgcatgccattcttcgtttggatcttgctggtcgtgatttaactgataacctgatgaagatcctcaccgagagaggttacatgttcaccaccactgctgaacgggaaattgtccgcgacatgaaggaaaagcttgcctatgtggctcttgactatgagcaggagattgaaactgccaggagcagctcctccattgaaaagaactatgaattgcctgatggacaagttattaccattggtgctgagaggttccgttgcccagaggtcctcttccagccatccatgattggtatggaagctgcaggtatccacgagactacctacaactctattatgaagtgtgatgttgatatcaggaaggacctctacggtaacattgtgctcagtggtggttcaaccatgttccctggtattgctgaccgtatgagcaaggaaatcaccgccttggctcccagcagcatgaagattaaggttgttgctccaccggagagaaagtacagtgtctggattggaggatccatccttgcatcacttagcaccttccagcaggcaagtctttgtttctttaatcttctcttgcatatacttttgccatattaaactgcattttgtactacgttgttgctaacttaaacttattccattcttgatcagatgtggatttcaaagggcgagtacgacgagtctggtccatccattgtccacaggaagtgtttctaaaaggtgctgctgctatttttacttctgttcacgagttcctttttatgttctcctgctaaagctattatgttatcgtccacagtgaactcgggtctgctgttaggcaagtctttgagatggggctatgaaagaagggcaattaaaacattgtactactgctgatactatttcatgtttccagtacaagcctcttttgtctggagatatatcccttcttgaatttgaacttgaacttgaactcttaggttgtttgtagttgcggagagtgattgtgttgttgtttattattttgttggggttttatctttcattttctttgttttgctatcctatggtactttttttttttaaaaaaaaacttgggaacaaatatgtcgatatttattgaatgagaatttttgtagtattttcagactttggaaatcagctttgtagtttatttggatgatgtgaggattacgttttctgtggtgaagtg

SEQ ID NO: 88 - DNA, 17868 bp, Solanum lycopersicum
  source 1..17868: mol_type = genomic DNA
aaacacaatgaaatgaatgttctcggacacaacccggttaaactgacccgactgacttgttttcttcaaaacccaagaaaagccctcgtagcgaagaagcaggaaaacacgaagaagaaagagttaaatcactctccgaaatcgaatcatgtacggtggtggtgagtatctgttactcagtctctctttcagtgtcaaagtttagggctttcacgttgaattcagcgttttttttgtttgtttatgtacagatgaagtgtcagcaattgtgatagatttgggtagccatacttgcaaagctggttacgctggggaagatgctcccaaagccgttttcccatctgtaagttaaaccctttttagccttgttagcttgcaaatttactaacattttcatgttccaaacctaacctttttggagtaactgttttaagcgtctaacttcccaagcaccagcattttaatagctaattcgagtcgagtgacctcgaaagaaagtgtaagtagcttgttataactgcagtgataatgtgaaaaacgaaatatgactggatgttattaccatgaaaccacaattgttaaagattgttctgcaaggtcttgtagctctaacatccaagaaagctaaaggagcagtcgaatgagtacagaaatatacttgctcttccgtacttataaaacagagaagggaaaaagaattacttctcttacctatctcagaaccagaaaatttaaatgatgctcccatatatttgtgcaaccatttcaatgtttcactttcagaaaatagataaaaatatagttggtgtatttattatattgcttgtacctggtgctgtagaatgttggttcaacgagggaagtccttgattgcactggaggatgtggtctgcggttaatgaagttagaatggaccatgggagaccagggttcaaatcccagtagaggcaaaaaaggtggatgataccatcaaaccttggtgatagaataatcacgtatatgtgttggtggaaggtattaagtaaccgttagattaattttgaagatggtaaggacaccaccattacccccgaaaaaaaagaagaaagaagatagaagtccccaatttcctacttagtcttgaacaataaaatttatagctgatgcagtgaaaagtttccctggaattatgtagataagatagctgccgagtttatcataaaagaagaagaagaagaaagatagctgctgagataattagcaagatctctctggttattctccttcttagattaattcaatatctagtatcttttgtcttctcaggattagttcaaatctttttctcattatggttgacacgtgaaatcttaaaatatcattagcaagtcagccgcttacaaacaaacctgccatgattgtgaatttctatatcactatgctattccttcatgtatacttatattttgcttctttttaactagtcacatacatgtatgtttttgtgtaagttgtctttgattttatgattttttaaaaggctgttggatcggttgatgaaatggaagttgataatcctgataatccagaggataattctggatctgctcctgaccttaaatcaaagggtaagcggaaattgtatgttggatctcaagccttgggatttcgccgtgatcacatggaggtcagttttacaaatttatctagtaccatctcgagatgccatttccttatctttgttatctcagatgttggattgtcatgtcaggtgatatcacccatcagggatgggatggttgtggactgggatattgtagaaaacatatgggaccatgcttttaggtaattggtccttttcttttgttcatatgttgaaacaattcccttcttccattaattttttgttgcgtcaatgggaagtatgttactcttcatatttttcagctcaggtaagtggggatatgctttgctctgcctatgttgcatagtcgttctatacgtgtcttgtcctcctcttttagtgtggaagtaccttagaaaccctcactgtggatcttaacatcctaaggtggtgatatgtttctggtcttgtcctggcagtctggcagacatgctcgctgattgccgtgtcctgtgaaacatattttagaatattgtgcgaggcagacaaaatctcaatgattttctttttaatctcatttgttttagttgagattggtgagttgttctatttcacaatttccccgatagctgaaaggtggttttaagcaattcacagaatcaaagacatggtagagtttgttgcagggttgtgttgatcaagtatttctaatgccccccagaccaccattagccaatactgggcattcttcgttttggttttactacattgattactgcagtgccctcttgcgtaaaatgttgttcgaacccttcgattactgctgtgggttggtgattcgaacatgacactgctacaggtgtgaggttcgttctgtatctcatcaacattcggtggataatttgaccaagtaaaggtgaacagagaaccgaagaagacagagatgaagcacaaaggagaagaggaagaagacaagaaggaacagtaatttgattagtgtcaccatgtgtgtgtgtaaattttattcttcttcgaagtaggacaaaaagatccgaaattttaggcatttaaaccaccattcaactaaaacaggggactgacacactaggattatcttctgggaagccaccactgatctccaaggtggcaatgccttagggtaatatttgcctattatttggtgggcttggttttaagagaagtgcccgggcaaaaatattgtgttttaattggaccacaaagatagttcattatagatttagtgacaagatctataagaacaagattaattgagaattctcaaaaaaaaaataaataaactgagcaagaataattgactaacttggagatgggtagaggggcaggctattattcattgagttttgaactgtgtttctgctggtccttgggtatttctcagttataaaataaataaattgtgttaaatttggatcatttgacacaacaaaatatttaacataacttattaattaaccaaaaatggcttttagcgaaaatttatcttaagagtgagttatttttctatgttagaattattgattgttttatatattatgctttaatatagatccatataggtgatatctacttgttgggaataagcttgagtcttgttgaaacctacactctagaacctcttttacctgtgtcagacacttgcatatgtaccctttgcatctagattgccatgcagtctttgcgtgattgctcttatattaatgtaaataatgtcacattagtgattcatcctaaaaaggaaagacaattatgtagatactgcttgcaatctatttttgaagatcagactacaatttttttcccggagaattgtaacaagttgttatataaaggtagaccacacaagctgtgaagtcacccaaaacagtgtgaattatagttaagagttcctagatctaagcctccctacatgtaatctagaacattaaaaattgactgcgattcctctatgtattcttttttacactaaattgtgaaagtctaaacggttgatcttcaacttctggatagtgcttcgtttgtgttcaaaacatctctgattccttttattcaccaaatgcatgatgggacaatcctccatttctctttttgacttctttgatcacttgaattcctgctttatgtgaagaaatgtggtattactgattcatttgaagattaagagaaaaaagtcttccttatatgcttttcttgtgttacttttttgttcttttgtcccgtcatttggttaagttgatgcttgcctattgaagattgggagaaaaaagaacctttttcttctgctacttacattcctttacagggaatgcttactgatcgatccaaaggagcatccaatgttacttgcagagccttgttcaaacactcagcagcagagggaaaagtgagcaatgcgatctgtattttagcagtcttattacttcacattaaatcatgtcatttatcttttgggcattgtgtaataataatgtacatgatttcaagctttattattcctgaatgtgttgcctttttctgcctatttttgcgttttatgttaatttattggagaacacacttttattaggaggacgagaaaaatataagatgaaagcacatcctcaagttaagttaacatatttatcaatcctgtaggcccacatgtcttttctatttcaaaggggaaaggtatgagaattctaacagcttccttttatttaaaagtcattaacaaaccaacaaggttggtggtgaagatgtaagtactccttcatccttaaccaagaggtctcgggtttgggtctcctttgttagggagcgctcccccccacccccacccccacccccacccccaaacccaaacccaatgtgggacttcccggagtgaatccggatttagtcgggctccaatgtgggtatcggagaggtggagacagggtgggaagccataaaaagaagaagtcattaacatcagaagtttgttagtttgatgtgaatacaatatatatccaattaaacgaagtataaggtgatgggtacttttataattgatgaatgctaaaagtgcagctatttgtgatgaataaggacctagagcaccgatacagtgatgtagcaatatggagtagggtgaaagagaagggggaaatatgagaaaagagaggagagaagagcagtgagagtagaataaaacagaaatagagtgagagaagaatccacaaaagtgagattttagaagcagttcatctgtaaatctcttttgactagagcgattcttgtgccatgcttgagtaatttggacctatcaaaatacttctctaagctatcttccctattaaagaacaaatctaggtcaagttcccatcaaatttatgtctgtccaccttgactttttttataaggtcattgtggtcctcacaggtggtggatttctctcaaacataagatcacttattagggccttgcctggaattcctattcgtggtggtctgctaagttaggactgtcaactactgactggtgtactgatcaactgtttgtttgccaagaatggatccaaagtgtcaatataaaagccttatcttgtttaatttgtaataccttctagaatcagtcgagtccaaggaattactttccttaacaagaactgtctactgtgaaagaaattgtccatcatgaacccaaaaaagaggaaaggcagcctggtgtttgcattattatgtcatctgtatgcaaaatggaaattacagtggactgatgatcatctatttaacagggctgcagagataatgtttgaaaaataccaagttccagcattgtttttggccaaaaatgctgtaagtgccttaacccacttctaatctttaatttgtagcgtcttaaacataaccttctttgtgctatttagtagtggaacttccacttttgattcaagaacaaagaaaaaataataaagaaagctgtagcttcataacattacaagatcattccactctagttgttaattttctcatggtactgttaatgctaggttctcacatctttcgcatcaggacgtgcaacttctttggttgttgacaggtaggatgttatgttctacttactggctacccttttgaattacttatttgactattcttgtcaataatagagttcttttactgagatatctagtctcttagccgtaagatcatttataatatttgcattatctctttgtaccttctccttgaagtgggatatgaaaaaattgtagacttcatgacttctggtgcatgatggcatcttaattttagtatcttttcaccttgaatagttaaatttccatacatttacatctgtagcagtctaaattttattcataactgtatgatgatcgatgagcgaatggtgaaaatgagagaatctcaagtaggctagcatcttattcgttaagaattatgtttgagaatatggagatatgatgtctatctttgcaatcagtattaagaatatgtgataatgtgaattatagaaatgctataatgctctagtttagattaggtggatactattctgtattgttgctctagtttatattaggtggatactattctgtattgttattctctttcaatctccactattgcttagtatacctgtaatacccttccatttcaatcatctttttaataattctagtatgcgatgtcttctgtttcttgagcaagtaccagttttgtatatttaagcaaaaaaactcaataggttgtgctgaaaccatattttcaatggggaaaaaagaacagaaatctaggatattaatgattgaagcagtgtcttctatgtagttctgtttacaccaaaaccaaaaaaagtttatcgcaggtctacttggtcctctgtactgagttgcaactatcttcaaaacatctggaattcctctttccaaattgtccatcatatacaagttgggataatcctcgatctctctctctctctctctgaagttcctttcttttgcctcttcccagccaaacaagactccaattatttttcttggcattgtccgggcagtgttttgggaagcgagaagcggaaaaaagcgacgagggcttgcttcacagaagcgagaagcgtgaagcgaagcgcgtgcgctttttttaaaaaaagcgacatttagtataaaaataaaaaaaatattaaataactaaatagaggtaatatagtcttagattgaatgaaattacataggcaaaaatactcataagtcataacatgtaaagcaaaaaatcaaaaacataatttaatcacaaagattcaaactcctattcttcaacaaggctgctaaactaatcacaaaattaaaaaaaaagaagcaaaagaattgaaaaaaaaatagaggaggcaacagtcagtaattagaaacagagcaggcaacagagattaagaaaaagaagagaagaagaagaaaaaactagagtagtggaaactcagagagacgaagagatgaagcacaggcgaagattgtatatttcaggagaaaagaaactcatagagatgaactaataaacattagctaaaaaagagatgaacaaaaagttacctgcagttgcggtcgaggttgaagagagaggcagcctcagtcgagatcgtcaggagagagaagtattgtgaaagaagagtcgcgaggagagaaagaagggaaagagtcgtcaaagaagagtcgtgaggagagaggaggttatatttcagattattttttttaaaaaaaccaattttttttaaaaaaaccctatttgtcgctttttttttatttataaaaagcgcgctttattgcgcttttgccttaggttcgcttctcgcttcttcatctgaagcgagagctttttcagatcgcctcgcctcaagattaaaaaacgcacaagggtcgccttgctttgaagcgcgcttcaagcgcgcttttctgcgcttttcataacattgtgtccgggcaatgctctgagacttgtggaaatcttccatagcatgtttgctgcttgtcctgcattttagggatacatgctgactggctcagcctctttggagaaatctctctcctactaaggttgtctttagtcgtaactgctttcttagctaataacaaggtaaaatatgctaccttaaaaggtataccaccctaaagagtcttgttgccaccataatgtgtttccatttgtactcatctaactgcttgtaaagttctactaatgtagccacttcccgatcatttggattccttctgaactatttattccatgtatattccatccttgaggagaccgtgcttcttttactgtctgctattgttttagtcatgaatgccaggaaaatgttctttgaggcaagtattacctaaccacttaatcccaaaaagacgttttgcacccattttatatcctgataatagagtgatccctcactagtggcctaaatgttcttatagatctccgcaagctctatccataagatgagtgcactttctttgagatccacctgttatcttcaccatattcactttgataatacttcctaataaacttggggttcatgggaacatccccatagccatttagttttgagtcccttgctgtataactttagtttcctagtgcctaaaaagccctgcctcctccaaagtagaacattgctccacttgactctgtaaaaactaaaaaatctttttatccttattaccttgtcatataataaggctattcttccttaattacaatgattacattgattttgttgtacaagaacaagggtgacattcacaattgcaacaaatataggggtattaagctgctaagccacattatgaaggtttgagaaggggtggtggagataagggtgaggagggatgcgattcttttctagaataagtttgatttaatgttgggactcctagctacataagccattcatcttgtaagaagactagtagagtagaatagagagaggaaggttctattgagatgcttggaggctaggggtgaacttgtgatgtactctaggacaatcaaggacatgtatgatggagctaagattcttgtaaagacaataggaagagactcagagcacttacctattttgatagggttgcaccacaaatcaacccttaactcatttttatttgtgttgatcttggatgaatcgatgtggaaaatccaaagtgaagttccatgtggcaaatccaaagtgaagtgccatggtgtatgttatttggggatgccgtagttttgattaatgactcttgtcaatagtaagctagaggtttggagacagatttaggagtctaaagggttcagactgagcaggctcaagacataatacttggagtgcaagtttagtgtcataacatataagtctggcgtggaagtgaggcttgacatataaatcatccaaaagagaggaagtttcaagtatcttgggtctgttattgaaggaaatggggagattgacgaggatgtcactcaccgtattggtgcagggttagtaaaatggaggcttgagtcagagttttgtgtgatatgaaggtaccacaaaacttaaaaggcaagttctacagagtggtggttagacctattatgttgcatggggcatagtgttggctagtagtgatctttaagttcaaaagatagaagttgtacaaatgaggatcttgcgatggatgcgtgggcatactaggagagattagattagaaatgaggatatatgagacaagctgggagcgactttggtgaggacaagaagcaggaagtgaaattgagataattcgggcatgttaagaggagatgcatggatgtccaagtgcggaggtgtgagaggttggctatgaattgtttcaggagaggtagggatagattgaagtagtggggagaggtgatagacatgacacttttttggcttatcaaggactagaggtagggggttgtggagggcacatattagggtaggaggttattaggtgtgcattgtcttgctatttgtccatatcagtgttgcgaaaggcgctctccatagcgcctttggcgaatggcgaggcgaggctgtgtcgccattatccactgaggcgaggcgacctcaaataggcgactcgaggcgacccaatggcgacgtaaatggcgtcgccattttgatttttttaaaaaacttttaacttaataatatcaggttttttttttctattttcaaactttcatcagacttctgtgtattcctcttcttctcttcctcgtgtcactgctgcttcttctattcctcagtcgctgctctcttcttctcttcctcagtcgctgctctcttctttgtctctttccctcgagttgctgctccattcgtctctttctctttcactcttcactgctccctgccttcactattcttttttttcctttatttttttcactctctgttttgtcccggattactgtagaatgttttctgctttcactgtgttgtgactgttgtcaattatttttttgaaaaaaattaattatactatagtaattattatagtatttgtaatatatgtaattgctattgaaattttgaatattatatgtgcaaaaatgtttttaatctttggtattaattggcgcctcgattcaaaaaggcaagcgcctcgccgctcacctcgccgcgtggcaaggcaggcccttgtcgccttttgtcgcctctcgccgtccaaaacactggtccatattagtagtcgtagtattgcttttgtagtttcttgtcttccaatttttgttactacatgttttttatacttcaattatcgtattattttgttgtagctatagttcagaatgctttggtatgctttcactcctttgtttattctttttctggactgctttgaattgttttttcttgagccgtaggtctatcgtaaacaacctgtgtacctaccacattacctgtctacctctgtggtaggcgtaaggtctgcatacaccataccctttccaaaaccatactaggtgggactagactgagtatgttactgttatcaattgttcactcgaaccaagataataacattttggagatccatacattggtgcatggtagaaacttcaattatattcgtatgcttgggctgacataggtaaatgatgccttggaaaagtatgaggattagaaagacttgtacccgtggggatctggaagtgcttggagaggctggtgtagaatgatctggtacctttgttccaacttataatatctagatatattcaaaggtatagctatcttgacattaaaatcataattcatacatactctagaaagaatgatagagcacagacacaggaatcatccattcaatcaactacgcatcatatgtgcaatcatggacacaaaattaaagcgcatgttatcaaataacatttaagggtatgacctagggtcaatgaagtgggtacaaaccttcaaaaccagggttcaaattccagcagagacaaaaacaatatgtgatttcttcccatctaccttaaacttggtgggcaaagtcatctggttggagatagcagatacccgatgaaatactctagaagaaaaacggtatttggtttagaatacagtgttgtacacttttattacccaatgaaatagtctagaggaaaaaagttatctggtatacagtgttctacacttctattaaattggttaaagaatgttttgcatttttctatggctttggatccaggcaaatttgcatctttttctatttaggaaacggaatgcattgtttttcttgcattttttatttgttgtttattgagcattactaaagagatgtctgaactaattggttcagtggtggaggattgactactgttgctccggttcatgatggatacgttcttcaaaaggtatctctcaacaaagaacaactgcttaaatgtgttattgccccttttttttacttttgcttttctgactgtaagaacttgactggtcaaaagagatcaacataagagcgggggttttaccctgtgcgcactcaaaggatagcagctgcaggtttcccttgtcataaaaattaaataaaaaagatatcaacggatgatcatttttacatattttgttgagctattgtaagatagctacttccagtttgcagtattatgacctctttcagtttcttccttttacaaattaaatattttatttcctagcattagcagacttccacttaacactgtagagatctcccattaatgtttgtatatctgacatgcttcggtaaactgtttaattgctctgacgcaaattactttgtttccgaatctgctaatcgttctccctcactgtcaaaacttaaaaaaaaaagagaagaaaaaataggaaggaaagaagcaaatgcctatgatatcttttgtacttccccatggtatgcactgagggcctcaagttatagctcgcgagaatttctttgagagaactgacattttcccctcgaatagaagctttaagtagctattcattcatagaattttcctacttttccctatattgtaatctagagtgaagaagaaatcaagtccaggacatgcattctaaggtggaaaatcgactttttatgaggattgatcaaatctattttaggtgttgaagggggtaggtctctctagatgaaaatttaagatgtaattttttgtctatgggaggtagaaggagaaaaagggtttcatgttcaggttcattagcccttctctttgcttgggaggcagggtctaagctgctcatgaacttgtaaaatctgttttatttcgggaagtaagggaaaagtgaagtggttatggatgttaagtcttcaccagatgttctgtgcattgtttccaacttctcgaagttctgttttggttgtagtctctggtgcaacaatactactccatgttttagagctagaggctgtattttactttcttagttctttccttacattgtaaagttctcttttgatgtactttttccccagcattttcttaatgctggttgtgtaacgtcaataatcttactttattactcataataaaaagttctgttttggtttcattgaataggtatgttataatactttaatttgataacaggcggtttgtacatctcctattgggggtggaattcttaccgattgcttgataaaaagtttggaacagaaaggcattacggttagatatttatcgtcagttatcattaagacttatttgaatacaatgatctgttttttcttgaaacaaatttttttctttcctttttcctgtttatttctagataaaacctaggtattcattcaagcggaaggagatccgtccaggagaatttcaggtagaacatccttgcttcagtgctataaccagtctaattgtttaatccttcacataaattgtacgtttgtaactttcaagtattcaggcttatgtatcttcgtaacttttctttttcaatacaagaaaaaaagagaaccagattacaacaatatagccagtgagaacctgattgtgacttaaaatgaatttgtgctcaacttttgtcttacatcaaagatgttgtacttgggtgtcatagctttctcctgcatcaagtttttcttgctcaaaactttcatgctttgtttctgaagagttcattctgtttgcattaaatactggttcttctttagccagtcgcatcaaatggaggcatcatagaaagcctaattttgtcattggcaaataggcatctgatttgcatggtctgctagcactgtagtgcttaatgccttttaatttgtaatatattgatagatttgttgctaatattcatgatttgtttcacagacagtggaccttgatttccctgatacaaccgagagttacaagctatattgtcaggttaattattcttagcattcctttcttcagttgtttctctcagctgctcagtatttttctatttcgcagagagcgattgcaagtgacataaaagaatgcgtctcccgagccccagatactccatatgatggtttctttctcctctcagctattatattcttatactcatcttgatttcattgattctgttaatcatgtaagttcctttgaagatacaaatgtatccaaatgtgagtgggcagttcactaaatagtttacttccattctgaatcaaatgccttcatgcccttttagggtcaaatttggaaatagttacattgtccttgcggaatgtaattgagatattcaaaagctacatgtcatttacgatgacattctattagtcaaagaaaatctgttgactcgcaaaaagaatttttttttactaatgaacgaaggtagcgtctgatcctcatctagcataggtattaaatactatgttgtttcctcttcctcatccaactctgccgcaacagtttttattttattttattcatcctcccccccccccaaatgtaggagaaatttacaggcaatgaaatgttgatctaagtgtagtgaaaagcgatgattcctgaagatattgctaacactctataatgtgttgtcgactgaaatgaaagacttatctcttctgtaatccctggatcagctattaatcccttatctaaaaggaaatagaaaaagaaagattgaaaaaagtaacttcctcatcgaataagatgtcactcatatcttttgtccagtctttaagaccttttgagtatatattcttgctcatgaggacaattaagattgcttcaagtcctaatgacacttaatttgttttttttgaatttattctatatgaagtatgtttgttttgaagtttgaaaatattatgctgcttctctgtttcgtgcagacagttcatattcgaacattccaacgacatcttatgagctacctgatgggcagtaagtgttgtactcttgctctgtttctattggtgaatgagtgattcagtttccttgaaatatttggttgaagatctaaatgcaaaaactgagaacagtttcacttagtacttcgtaaattactcttttttggtataaactcgaagccttgtgatagtaatttttctgtccaagattattcggcttcatctgttcagacttcagagttactgctgtgttcttattttgattaacctatgccttgtcaaaaacatacagaccaccttccttaattggcaaagtccatcatttgaatactaactgaagattgaattactttacaagtttatatatttttcgacgcgacaataccttctcatattacttaaatatctaacaacctcatatataggaactcattactgttctcttacccattgcattaggtcaatgagatttgtttgggtggggtgggtgggggtgggggcgtagggtggcattccttactagggttaacattttgttgctttatgacacaggataatagaagtcggagcagatagattcaagattcctgatattatattcaatccatcattggttcaggttggtgttgctttagtcttccacattcaggtttcttgttcagcttgcttatcttatgtgagtaggatggatgtgtactgttttttgcacacactttcatcttgttttttccaggattctgtatttttaggtttatcctaagatgttgtatctgtagtgcttcttgctttgctcccttctgttgttgtatttgttgctttttatttattgatccttcggaagtagggtgtacttgtagctgaagcactgattggtatgatctgtaaactgggttttttccattgcattgaatgagaactatattttaaggactattttgatagtaaatgaggtttatggactttgctgtgctgatttgcatacctttagtattgttcgcacaatttggtttgacattacctttttacggtggcatctcatttccttgtatctcaaatgttcactgaaaggtttataatatttggatcacacaatagtgggatgtttctagggtgacacttccatgacccctctaccttgagattcagattattttttccattgccaaagatagagatatccatctgtaatgacttctgataaaatatttcttgtgttttttttttctgtatattgtcatatgatttcaaatgcagtagtgttctgtctgcctaaaaatacctggtatttggagaatctgtcctctgccatgttaagcgagctccttcagatccttcatatatatagtcttacttggtatttttcttgactgatgtcacagactattcccggtatggaaagttttgctgaaactgccgcttcccttcgtggtcttccacaaatggttggtcctttctctctcaaatttggccgtatagataatatatcggttaaggacatgagtccttcaaatgttcttctttcaccttctctttgttttttcaactaataattatacttgaaacttttcaggttatagatagcataaacaagtgtgatgtggatattcgaagagaactttttagcagtatattggtaaagccatcagcatttcttgcaatctatttaaagatgaggcatcggttccttttcttttgtgtgcctcctttctttcctatcgttgtttacattgaaatacttgtcaagtcacccgacaaagtattcatttaaatccccattatcacattgtatgcactgaaactgagaggatgcttccttcaggagaagaggatggaaactgcatgactaagtaactttaattttaaaactggagtgatgctccttatgacataataaataaaaattactatttgtgttgaaaaacaatatgaaaaactcaataggagattaaaaccaatatccaaatttatcactggattaattatcttcagtcatttttacccactgcgagcatatgaatttccccaaacttattttatttcgtctatttgagtatgaatcttttgatgagatgctagtttgacttcactgcccactacagcttgctgggggaacagcatcgatgcaacaactcaaagaacgtctggagaaggacttgctagaggtgccgtttcccttttgactcttaactatgccctctccttcattcatgcatgtaatcgtgttcaaggatagcattctcatcttatctccttagcttgaatagcctaattctgtatcttgtttacgcttctttcaggagtctcctcaggcagcgagagtcaaagtcctggctagtggaaatgctacagaaaggagattcaggttaaactattactctgtagtcctctttactgtttcacagtttctcttcatagtagtagttccttttgatattgagtgtataaagtaaacttagatgctttcaactgtataaagtgtgtttttctacttaattttctcatctggatgtaacaactttcacggactgtgttggacttctccccatatttgtcacttctaagtttaagctgacaacattttgtgagagtacaatttcaagtatcttgttttttggtctcccttgtcctgaccccgtctaattgcagtgttgagaaagcagtaaacgtacttccatttattttaatgctattactacatacaatcttgaaatggtaatttgaagaagatttacaacagtgttccataatggggagctttcttcacacgagtgaactaacaagttattgtgcagtgtttggatagggggcagcattctggcatctcttggctcctttcaacaaatgtggttttcaaagtccgagtaagttttacttctgtcgcttagtcttgaatacaatactacacttggcaagcaagcgttttgtttcctttgaagtagcactgtgaatctgttataactatagttctcttagtgattacaccttttggtttttgccaatgacaggtacgaagagcatggggcatcttacgttcaaagaaaatgcccttaagaaagacgattttgctgttatattctacgggtagcgctctatttatgggactagcgtcaaacaatgactgttatcccaaacttaccagcttagttcatgtcttgtattattaggaatctgtatcagtggattgttattattctgcaatgcactatgtacatccatatcgaactagaattgatgcgacttgctattttagctttttagcgaaaatgctagattaaacacccttgaccctgtcattgtaagtaatatgtgctaattgattgataagtacctcttttgacaattaagtggacaaaactctctttgttttttgatgatggattaa

SEQ ID NO: 89 - DNA, 15347 bp, Solanum lycopersicum
  source 1..15347: mol_type = genomic DNA
tatttccccttttctcatctcgcttgcctctctcatcgctttttcgatcttgctcagctctctcctcttaatgtgtattaattttgatacaaatctatttgtacttatatattttctccaaaatccataaaaaatgcactctcatctctctctcaaatttagctcgcctcttttctcctctaacatttcgttgttagtcgtaattaagcaaagtataattataaattcctaataaaggctgtcgtttacttattctgaaatttctgtgtcaaataatgatttgatatttgagaaatcggaccctaacattgttgttaaaagttgttaattacaatagccacctggcacggatgtaaaaccgaatgaacaatcgagaaatactaggaaatattttgtcttgattgctaagaaaggaatcccaaattgaagaagaggaggatgaattcgaaactgtttgtttgccttattcaatgaaatggaaatggatgaattgaatttgaacccttcaacgaacgctacttccgtcgtcctcacctttctcctaccttatacgtcgtcgttttcatctcctttcttcctcctacgaccatgattataccctttaaacctctctttggatctcaaccgcagatcctctctttcttcttcaatccttatggacccttctacctctcgccctgctgtagtcattgacaatggaaccgggtattcattctacatcaccctttcattcaattcttctaccaaattacgttttttaattccaaatttttctcttattttgcaggtatacaaaaattggttttgctggaaatgtggagccatgtttcatactacctacagttgttgcagctaacgaatcatttgttaatcagcctcgagctttaactaagaacagcaactggttagcccagcacagtgcaggggttatggccgatctcgatttctttattggggatgaggctttgaccagatctaaatctagtagcaattacaatcttacctatcctattcaacatggacaagttgataactgggattcaatggagcgcttctggcagcagtgtatattcaattacctgcgttgtgatcctgaggatcactattttctcttgactgaaagccctatgactgcaccagagaacagagaatatactggtgaaattatgtttgagactttcaatgttccgggactttatatagctgtccagccggttcttgctttggcagctggctacacagcatccaaggttggtactcgtatcttaacaactttgttgcctgttgtttcctggaggagctcggatattttctggtattgatattcttgtgatctaattggtctgtaaaattaacttaaccttgttcaacataccttttgcttcacaagtagcgttcttgactagaatattatcagaaagttaattgtgtaatagactatatcctggatttttttcagaagtccggtattgctttaatttctcacattattctgactaacttcaatcatgtattttattcataaaatgattaagactgaacaaattgatgtgctcagtggaaaggttgttatgtttctgagattcagattgttgcctaagtaatgagagtataaactctgaaaaagggtgcctgtgtcttgtacaattgctaatttaggatggtgctataaaattagaacaaacattggcagcatgattccatggcctttatttggaacaatttccgtaaagtgatgtattgatgttagagtcctagggtcaggtctctgaagtgtgtatgtaacctacttacttataaaggtaatttaccttgaaatatgctactaatggtgttattttttggtgggggtgggggcaggggttgttttccccgataaaacttgctttcatttaatttaaactatcaaattgttaaatggtagcaccttatcacctttggtgagactagaagaaaggaactttgaaaaataagttgatatgctattttagggaatattgttatgttagccaattttggggaaaacaaacaaccagggtccgtaggaggcaaaagttgattactggaaaagctttagaggaagaaaatacaatagagggattgagtggaaatagtttctggtcaagggaggagaagaagaaggaaaaaaaggagctatataaggatatgtgactgttttaatgatatttggctggtgctttgaactgtcttttggagtggaactctttttttgggggaggcggggggagggggattcttgagatatcatgccatttttttttattagtagcaatcaaaaaggagtataagttgcaccaaagggtgtggcgtagttgtcaatgaagtgggttgacaaccatgatttctcaggttcaaatcccaacaaagacaacaaacactagtgatttctttcgatatgtcctagccttagtggatagagctacaagctatctgttgctgggtgagaggtgacaggtatccccagaattagttgagctgcacacaagctgacctggacaccacatttattaaaaagaaaaaaaaaggaaaataagtcaaatcatacttaagaatattaatcaagactaggggtgtacataggtcggttcagtttcatttttatttaaaaaatctaaaccaattatgtcggtttatcaaatctaaaaacaaaatcaaaccatataagtcaattttttcggtttcggttttagtcgttctttgggttttttcggtttttcaactttttcgttttttaacaactataccgcatttgaaaaagcgatacacattttttcactcacgtgtgtgataaacaaaaagtgttaagtgaatagaaattttcgaaaagactgtcaaattcacatgaatacaaaatattgttttttgaaatatcaacgttcattatggtaaactaataagattaaaggatagatgcaagctgaatacaaaaaaaatttacaaagtaaattgttcacttcgaatttgaaaaactataacaatataattataacttcggatcttaaaacacaataaaatatttacaatttttacaagtctaaacttgaaataaaatagataaacattgaaaaccataaactaacttaaaatatgtaacaaagtagattataataatattttttagttataaataaaataaaataatatatatatatatatatatatatatatatatatatatatacacacacaattacaaaattttacgagcccaaatttgaaataagatatataaaattgaaaactataaactaactaaaaattatatcaacaaagcagattatatgtaaataattttatctataaataaaataaagttaatatatatatataaataaagagacacacattgagaactataaactaactaaaaatatattagcaaaatacattataaataatattttttagctataaacaaaataaattatatatatgtatatatacaaaattttacaagtccaaatttgaaataaaatatgtaaaattgaaaatcataaactaaataaaaatatatcaccaaagtagattatatgtaaataacgtattttatctacaaataagataaattatgtatatatatgtgtgtcggtttggtttgattcttttttttctaataccaaaccaaaccaagagtggtcggtttttttttcaatcgccaaaccatcaaaccaaaccacaagtagttttttttttcggtttgatttggttcgtcggttcggtttgacttaatgattcggtctgtacacccctagtcaagacaaaaggattattagtcaaacaaccaaccaaaaggattattagtaaagtcaaacaagcaaccataagtattattactactcatattccaggcccacgaccaaaaatataagattacatcaattaggttcttattaagtaataaagttgatagggagataagtcttctaagaattgacttttaaccttttcttcgttggcctctttggactttgtcgggtccacttcttttgtgtcttctatttgaaagaaacgcaccaaccatgtccaacgaacccaagaagaatgaattttggccaagatcaagatgacttaattcatgaccaactcgatcattttaatgagtctaattgatgtaaactttcatttagtctggaactaaaatttatgtagtaactcaaatccaaggctgtgaagggtacctacagagctaccacctaataggcatgtgaaaaaataatgtggcatctgatgagcctctgagatggccagcgcctagaacactgcccgtcacaagattgaatatttttttcaagaggctattggactcactttaataagttaggtggataaacggtcgcctgaaagtttccccattataatcttatactttttcaactagtttctatcatagttatgaacaaaaactgcatacaaagagagcttctcgctatgttatagatgattggtttcttttatgcagatcctttagtcttatataaaccttgtctgcgggaagtctccctttcactcaatcgaactacagatttatctaaggtagagagaaaatattccacaattatgtcattttagaactccaaatcaacttagcaagattgataaatgaatccttgaaggccaccatcaaagtaatcactgtatgaaacataaaaaagttaagaggttagatgtgacgccctttagggttgatttgacttgcattcgaaatgccttaagccatgtaccgagcaaccaaccatcttgtatcccctaactatatttaaacacataaagggatacggttatcgttgtattaccaatcacatgcactgggatttcttgcggtcccgtaccatcatgaattatgcatttaaaatgtgatgcttaaccattcaagcaaataatgtctctacggtctcatcataagtgaacttgtcttgtaaagggatcaaacattgattttatactcatgacattcactgatacacatctcccatggtgtgcccattgagcctttacatggccaaaaggacaaataaacgctgagacgcagccatgatatgcaaacgattgaagtgaaatgctgaccacaccaaataaaatatgaagtaaagcaaataaggccaaacagtttgtcgagtcagctgcctgtgcagtgtgcatatgccttatacctttttccaaagtgtgtaaccttcagggaatgcaacaaatttacaaacaaatttgagccttgaaaaccagaatcacagtaaattccaaagaaatttgtcagctaagctagcattctggaggctgagttaataaatgggcggatctaaatgctcccaggcacctgtcccgaggtaactctctcccctacttcctggggggaggtctctctttccggcactctatcgccggaaatttcatttccattccttccctttcattatctttcttaactattaccttacgtgatagttttccgagattcagatccttctttcagactttgcaatgggtgacaacaggatttatatcatgcgggttttaagtctttcgacatcactaaatggagcactggcagctctgtgtggttcaaatgggttgagaggagtagaaagatgatgaggagattttccatgagcaacaaaaccatggaatggatctgcttcactcttagagaagcttccagcgatcagaagaaaactatcagaagatggaaaactgcagaaagagaggcggagcatttctgtactggaaacataatgaacatgaaagatttattagtatcatttccatcaataacggtcatcccagaattggccatgaatgcgggatggcacgatataacatttaaaattgaaaggttcattaaatgctctaaaagaatggaagtgccgagacctcctagaataaccacaaccaactactcttatgcaaaaacagttaaggatagtaaatggcaatcaaagactataaaggaggcaggattatgaacaatgctagcattattgaagtcctcacacatgctgaagaccaagagaatgggcttctaaaaagatgcctagtaggccatccggaaggacagatgaaggaaaagcaaactttgcctgagataacagatggtcgtcaacactctggaaaaaggcatttggagttatctgtgaaatgtataaggtatgtttctattcgagttccctaacataaacacggacgagcaaaccctccaaggagtagtgggactggaagaatcacagattcaatctagaatggtggaatccaatggtagcttgtctccccaatactactctgaagatggaaacatgtatcagaattgttgggatcccccttcatctctggtcggagagagtatttcaagaaatcagaaacttatgcggaggttgggtggccacataagaggaaacagaactaagaaatcatatgaagtgggcaaggattctagttgcaaatgacggaagaaacattcccaaagaagtttcaatctccagaaatgtagtacctgagaagatagagcacatggagaagatggagaaatacctagtacatgcctttacacaacagtctgaaggtggtaaaggctgtggtaaagttagtagtaaagcctgtggagaagtacaatccatcagcttagggatgttgcatcagaggaacaagtggatgcagctgtaaaagcaagagagggagtagctttgggccatcaacagcccaatagaaagaggaaactttacaagaatgggcctgacttctcaagtcaagtccatttttaacgacataacttgtaagagcccaataccacttaacagtggtaattttccagaactcccaagctgcaatacaatcaagaaactggaagaacaaccacacaaaacttgaatcaaattgcccaagcgaaggaggagatagtaaacatggtcggggaatcatttatcgaatcttaacgccaattaatagagatacatgataatgaactaaggggggagattccagaaaaagaggataatggttcgatcactctcatgaagaactgggagactgaggaacgagagccactacaaattgtaccaccactatgagattctcagtacttatgaagggatcccctatcgatttctttagtgcagagaggggactgaggcaaggagacctttgtttcctttccttttcctacttgctatggaagggccgaacaatatgatcaaatcagttaaagtgaggggatgactcagaggttttgaggccagcagacctgaagtagataatgtggaaattacccatctacaatatgcggatgacacgttgatattatgtgatggtgaagaaggcctactcatgatgttagggtgatcctagtattgtttgaagggttctctggtctacacatcaattagaggaaaaaccacatctatccaattaatgaagtacacaacatggaagctttaaatgtggttttgggaggggacttggagcactgcctacatcataccttgggatgcctttaggggccaatctcagtcataagaaatctggaacaatatggttgagaaatgtgaaatgaagtgagcaagatggaaatcacaatatctctccaggggtgcaggttgaccttgattaattctgttcttgattaactaccgacctatatgatgtcaatatccccaattccaaaaagtgtaatcactaggttggataaaatcagaataaaaattttttttgcaaggaaaccgggagaggagaggctacaatttggttaaatgggatgttgtgatagtgagaaaaaagcatagaggtcttaagctcttatgatgaaatggttgtggaagttcaataatgaagagcagtcctactggaaggaagtcattaaggcaaaatatgaagaagaagataactggatgacacatccaaagaggggactacaccatatggggttagtgtatggagatccattagatctcttcggtctgagtttaaggctaacacaaatcaaagtgagaaatagagaaaactaaattttgaaaagatgcttggcctgatgcaggtaggctagaggtcttgtatcctgatatatattctctaatatctcatcaacagaagaccatattagatcattggactcctcaagggggaagttcatcttcagaggacaattaaatgattgggagattcattgggtagcagattttttcaacaccattgggcaatttaacgaatcggaaggaggtcaaaacattttgtggtggaaaggcaatcaaagggtagctttaaggtggattgtgcatacaactgcttgaaccacaccaatcagcctcagagtcactggccatggagaggaatctgaatgtctaaaattctactcgaagtggcatgttttgtctggttgttagccattgaggctgtactgactcaagacaacttaaagagaagggagataacattatgttcttgatgtttcttttgtggggaaaatgccgagactgttaaccatctctctctaaagtgcaagttcactgaccaactatggaggttattcttgaatcttaagggtatctcatggaccaagcctaccaagatcacagaagcaatccagagttgggaggaagtaggaaagcaacccaagtatagatatagatggagaattttcctagttagtatatggtgtgcaatatggaaggaaagaaactctagagcttttgatagtgtagagaatagtatgcaaaaagtcaaattaaattgtcttatgctagtatgtttttggtgtaatcaattatactcaaatgataccatctccataattgatgtatttcagtttcaaaaaaaagaaattgatgaactagactcaatttagtaaaagatagtaggatttgaagtgcatgttgtaaatactgaccaatacagttttggtattgacttttgaaaaatagacaaggttaccaatttcaaaataataaagctagcattctgattgtaagggcaccattaatcatcaataacctcatactgaaagagtcattctggtttaagttcatctactccctgaatgcactcccgagtacgtcaaagagaatagcttttatgtcttttgccaatgacatgaactggtatctttgtcatgtcaaagaaaataatgaccaaggagtctattccaaccccctttttcttgaaactggttactttgagtctcttccaacctaatatcttcattcttttcttttctagtggaaaatgggaagatgaacattgagctattcagggagtagttatcaaaggtgcgctttaagcgcgcttaagacctatagcaaggcacgaaatgtgttgagcgcttcgcctcgctttatgtgcgcttcaatatcctcatcaaggttctaagacaaacttttccttgcgaatgagcctcttatgaagaagtgacactaaacaattgatatttcactttataataaaaaaggagaagaccctaaaatgcccctcaactatttgaataggtgcaaaactaccctcaaaggtggatcaagggtattttagggccgaaaggtggatgaagggtaattttgtaccaattcaaatacttgaggggcactttaggttcttgtctgtaaaaaaaaatcaatttcattggtcatatatttgtcattctatttttagttattggttttatttgtattttttttctccttttgcgccttttttcatttaagcccacgttttatttgtgctttgcgcttaaagcccccacagaccttggagctatttgcctttaataacactaatgtgttgcatgtcaacctcctttagtatgttctttttttaaaaaaaaatcaataactctgtattatatcagggatcaaaacagtacttgggtagtactaaaacaatgtttaatagagctctagtgtctttcttctttagctgtaaagaacctagaacatctatgatagacacagtatcattagattaaatcagtaacttcatatgtttgttagttgcttgaaataatatcctgtgtattggttctcttttatgatcataggtttcttgtataccatttttccagaaactgaacttaattgtggtctaacaatttggcatatcttgtaattgtgataaattatttctttagtgtgagatgactggagttgtagtggatattggagatggtgctacccatgttgtgcctgttgctgagggttatgttattgggagcagcattaagtcaattcctgtttctgggaaagatgtcaccctcttcgttcaacaacttatgaaggtatatagttcttgtttctcaatgaattcagtacaacacttcgaaaaatggttgagtagactctgcatgttctctattttcccttgactgttactgatctatcggggtcgaatgaataacataggattgtgatatcctgaattttgtgtctcaatgtaattggtattctaaatcccatggagttccagctgtccaggagatgaaaattaagacgtagaatagattgtatatataacctttagcgcacaagtttctagtttaaatgagtatgctaatagtaacgatgcctagtttcaatcatttcatttctttatcttttgaatgaaagcaacaggcgcaagggtcgttttgtgctagtttattaatttctttttgcacttcttaaagagtttttgtttttgttcgcaaagtaatttcttttagtaatgtttgtataggtttgtaattgcctattcaaaaatttcgtttttacgtttatatttttctcatttttgttcaatagaatttgattgaattgtataaaactcattttggttgataatcgtatatttatttatgtactaaaattcatgtaagtcgacctggattagcccaaaatggattgaattggttgaatgtacaccctaattcgatgtccatcactacgtgtatattaaagacagtggcacccgcaaccttcaaatcttagatccgttttgaaattctttacttggaaaatcgagttgatgaattattaatctttatcacaatcattatccaacactgttatttttgtgttatttttttttttggaaaagggtcaaaaatgcccttagagtgtacaaaattgaacaaaaatgctctcctttaataacttggtccaaacatgcccccttaattgtttgacccacaatgcccctattgttacttttttatctgatatccctgaaggtacctccctattgttatttaattgggtcaaaatgcccttttcttgataaatattttttcttttcttttaaacacattcttttccttgtaaaaatatgaattttaaagaaccctttccttgtttcttttctttaaaaatctctttaactaataaaagtgggaagtaatttttaattcttaatatcgtttatcaattaattagctaaatctcatgtacttttaaactaaaatataggtcatatgtataagatcatagtaacccatcatcatttttcatttagataacaataaaaatcttttttcttataagataaaaaatataattttttttaatattcttctgattgaaggattatagggatttgctaatgccataaaataagaaaatttattatattatgcaaatcacaaaatatctatataatatcattgatggagttattgttgacccttttttagtttcaacttttaagcaaaaaaagatatttgcaaatgtttatcctacttcaatttgaaaaacattaagacaaatttttttccctagtttatttggaaaaataattttattatatctaaatgaaaattaatgatgggttataccatgatatattttatggattgttgtttagaaaatttttcctggagagtaaataagattgataattaatgattggtcctcctatgacttgtcatgcagaagttttattctccagtgctcggatcatagtttcttgaattaagaagtacctcttaactactttatttataatatcaacgtcttttaccttatgttatcccagttataacagatgtcctaaacctgtgggaaatataaaactaccattgctcagtaagggtagccacaactaggggtgggtgttcggtattttcaaagttcggtttaggtacccatataataattgggtaataaagtgttgaagggaaaaatattatgatagggtgcagtattgcaattatctcttaacccaaaattggagaagacaattcttgaaattgagatttctacagagcacgtgatgatttctcaaaaagagttggtcatgttcctacatacaattacattgctgactagcatgtaaaaaactttaaaactaacaaaaagagcacctgcttgaaccagcgaaacagataactgaaaccaagaaatagaattacaaattggtagtactgaataccggatgcctgcaaccgggtacgaaaactgaacaccaaaattttgaaacttctcccaaagattgtactggttaccgagtctccggataccgaaattcctgttttcgctcgataataccaaaattcccggttaggcttggtaattttcaattttcggtgatttatgcttaccggactgccgaaattcctggttaggctcgataatactgaaattcccggttaggctctatagttttgcggtttctggtgattgagtttcttagatggtctcccattgtttggtcaaggtcaaaagataaccacttattttgattattcaaatgcaggaaaggggagaacatgttcccgcagaagattcctttgaaatagcacgaaaagtgaaggaaatgcattgctacacttgttctgacattgtgaaggtattatctatttgtacgagactatacaaaaggagtaaaaagaaaaaaaagttgaaagagtagattaagctggccccacaccatgatcatcaagaaaaaagtttgaagttcgttctgataatccatccaattcctcttgttcttccatccagttctcaaactcatgccatgatttaaactcagaatccttgtttgcatctgaggctggtggttacaactgatttttgcttctaataggtccttattgtcaaatgatttcaggagttcaataagcatgataaagagccaggaaagtacatcaagcactggagaggtacaaaaccaaagacaggagcaccttattcatgtgatgttggctatgagcgatttcttggtcctgaggtctggtttatcctctagcttcaagtttctcaatctctttagctatatagttttgatctcaatgtgcttgttagttgtatgttgttagcctacaagatgggtcaaagaaaatggagtaccttgcatatagaaatttcatgtcagtccttttccttatatcactatttgggattctcctcttaatctatatttttcctcataatacctcgcaagttttccacataatgtctcataatacagacaataactctatttttagaaatttgaattattttagcctaatgtttgcactgcatctgtacctggattcgtactcccaaatcttaaattttagatcatgatggatccaacctctagatctgcacctgtgttgggtacccgcacccgaatccaagcaatttaggtttcagccatatctctcgaattgttcagacaagttagctcaaaccctatgttttttttgcacggagtagctttttttctttactctagctcagtgaaaatatccaagttaattgaagaaattaagatagtatccatgctcatttgacgaggggaagcctcttgacttggcttactggtctggtgctcgactcacgctgaatgataatctggcgaccactatggatgtggctctatggtagaaattaaaagaaaagctttggaccttaatcaacagagttagatgaagtaggatttttttatggtggcttcagatgctttattcataagttgtcttgatgaattgtgttcacaggtcttcttcagtcctgagatttataatagtgattttacgagccctttacctgaggtgattgacaaatgtattcagtctgcaccaatagacacaagaagagctttatataaggtaatttagttgctgaattccatagaactgttcatgagtgattcagttcttgatcaacaaaaaggttccctgtatcttgaattaactcaagttatgtgtggacccacttttctatgtgagtgtgatatgttgtgcacttgttgaagttcagaatattgttttatctggaggttcaaccatgttcaaagatttccatagaagattgcagcgagatctcaagaagatagtggatgaccgcattcttgcatcagatgctcggttaggtggaaatgtcaaagtaagtgttttcgccttccgttttcacttgaattttagcagatgaataaatggtctccaatatatcaaggatgattgactactggaattcaacctcaggcacaaccagttgaagtgaatgtggtcagcaatcctatccagagatgtgcagtttggtttggaggttctgtactggcttcaactcctgaattttttgcggtatgttaatccttctagtttctattttatctgattgtagttaattactgcaaaatgaagttcgttgcatttactggtttatgcattcgatcaaataggggaatttaaaatctcattttgatgatcaatttggatattttttttacgttaggcttgccatacgaaggcagaatacgaggaatatggagctagcatatgccggacaaatcccgtatttaagggaatgtattgatactgaaccgatccaaactgatgattgtaaaagcatttattgtcaagatgtgcacatcctaacaacccaatccatccgtccttggtgtcagcttcaagctgaaatcctacatccgcaggtggcttcagttatgtcagccgatcagaggcagtgtaggatggacctgtaacgaagggggttcttgtacttttctccattagcagcgcatgacttctggccttgttggaaaagtaggctttcatcttccattttgcagatggctgatcagttagaggacattttctgagctgaatgttatgttctgcatgttcagctcagtttagggatttaccagtttattttagtaagagggcaggataataagtttcaaacgaattcaggtaggtttcttctaattgttatcgaatgactattattgctctatgtcaaagattcatgtagaagcttcttttctctgtagacgcactctcaatgttgaagctatacctgtatatttggttcactactggaccttcattccttttctaggagtagtactgtctccaagttattttgtctggtgcaatttaatctgcatttgcgctt

SEQ ID NO: 90 - DNA, 6666 bp, Solanum lycopersicum
  source 1..6666: mol_type = genomic DNA
atatggtgttcgcatccctccttattttggtgtatttgaaaacgtacgggagatttgatcctatttggggaggtgaccgcggtaccacagccgaccaaaaacacaaaacgtcggggggtctgaaagctgatttgtttgattgctaagaaacgaatcgaaaacacccaatagacagtgagaccaaagctataatttagtatagagtataataatgatcaactgtttgatgaatattcccaagtactctctttactgctacttcaattcttgtcacctttctcattgaaatggatggattatatcttttacccacctccattatcatcctctttttagtattacatttgtcgccacccctttctttgtttcaacaaccatgataatggaccctgctacctctcgtcctgctctagtcatcgataatggaacagggtattctctgaatcattggttcttttatctgctcaccaactgtttgatgaaattcctcaaagatctttattttatgttttcaggtatactaaattgggttttgctggaaatgttgaaccaagttttattttaccgacagtggttgctgttaatgagtcatttgtgaatcagactcgagctacgactaagaatagcaactggctagcacaacatagtgctggggttatggcggatctggatttctttgttggggaagaggcagtgactagatctaaatctagtaatacttataatcttagttatcctattaaacatggtcaggttgataattgggatgctatggagcgtttttggcagcagtgtatatttaattaccttcgttgtgaccctgaagatcactattttttgttgactgaaagccctatgactgcaccggaaagtcgagaatatacaggggagattatgtttgagactttcaatataccagggctttatattgcggtgcagccggtgcttgctttggcagctgggtacacaacatctaaggttagtagcttatgtgtttgaaagttcagctagtatatatttccacataatactttggttgcagggtaccttaaccaacagaaataaccttaaaagctaatagctttttcaagtaatatggatcttttagtaaggggttataagaaggagctgtttgtgttaaagatgataaaattggatctttatttgtacattaggagcgctaatgtacaaattattcatgactgaccttgcttcatttggaaaacagtaatatatgcagctgtgtctgctttattaccataagttcattatgtttctgaaatttagacttatttttgcttagctaaagagtagcttgataacatagtaagtgcaccagcacaggaaagtctctctttctttcttaggggagattggttttatggccaatgacaaatgttcttttacttatattgccatattggtaaataaaacccaagattgtaggtagggttattttcttctattcaaaatctaattggtcataaacttgtgggaaattgtttcctcctttattagtcataacaattgttgtcttgtaggtgacaatttgctttgaccagttaaataaaaataagaacacgagttgatataatatgaattatagtatggcagcccttatttgcactttatccgggaaatgatacaatcagtagtcattggtagggtgatctatgcttacatacaacattattgattgattatgatacagaatgttttagattctgactcaagtcgtcttttaccgaatgtatctacctctgttgtgggatgaaagtttagcagtcatgatagatggttatctcttactttcactatgaatgtatggattttgttactgtcatttagtgcaagtacaattagagtgggtaagatagagctcatcaacatgccaaggtcctactcatctgtgagggttgtgccagtgctcttaaatgcagatgaaacttacttatatttatgataataatcttacagtacaccatgttcattttattttgcttttttatggcattctacccatttaacttattttcatggaatttagatcatttgcctttgggtaactaagtgttatgcctgctataaatgttctttaggaagatttggcaagaactgtaaaaccaagttgtacatgctatttatatggacaccataaactgtatgaaaacaattacaaaccaaagaatcaagacatgaggaagggataacaaaagaactcaagcaaagtaaacttaaaaagaagatggagagggtagattaatggattggccaaatggagagggggagaagcaagatagaagaggaaaattcaggatatatttctggtaagatgacaaatgctagaaaataaaccctggtcaatcaagttcagggaaaaggtaaaggtagtgaaagagttcaactatcttttattagggatgtcggtttggttaatccagtttgatcaagaaatttgtaccatatcattttcggttactctatagtgtattactaaagttagacttttccaaaatgtgccaatcatctcaatttctctttgatatcgatacgattcggtttattttcagtattttatttttaaaacatcaagtaaaaattaacttatcaaaaacaaagtgtcaagaaagagtcagtgttattaatccatccagaagatgcaaagttacaaaaggggatctgtcagctcagtaagaacaaaatagcttgtagcgataaagagctgaaaaatccaggtagtgatctaagttatttacagggtagaagttggcccaactaaaaaggttaaccaaacaactagccttaagcttacaatttggggttaaaactccattgaaattctcctgtttctttcattccaaataacccaaaaaatacaagctggggtcatgatccagattttcctgatggattttctaacttccatagagctccaactagtgtaggcatctctgatattgaagggcatggaccgacttataccaaaaagcgctaagaacatgttccaaaagtgtgttgcaaaagtgtgttgcaatagccatcacccaattcttaaggccaccgtcaatatagcattataatttataacttgctaggaacctgaaatgaatactataaaggctctagcaagttcatatcacatcttcagttagaccctagatgttcctttttccctttttcttgagctatgaagagaaactgctacttttggtcacattctgttgttggtacatccagtatccattacttgcttgtttaattatgtatttatgttttgtctacttcttgactggccttctattagatctgcataaaatttcttgatatattaagcagatatttcttgtccttttttagtgtgagatgactggagttgtagtggatattggagatggtgctactcatgttgtacctgttgctgacggttatgttatcgggagcagcattaagtcaatccccattgcaggaagagacgttacactcttcattcaacagctcatgagggtatgtacgacatctctcaaattggttgaaagaaaaaatgtgttgttttctcttcattcaactcctcatctaatttgttcactatctagtagacaaacgaacttattataaatagaatcaagcggtacaaatgaaagaattctgatatcctgacttccttgttatgataaaataaattggagttcaaagaggatccaagattatttaattcaaaaaaaaaagtgatatggaaactatatagtaattgcaacctctagaaatgactacactcataaactttagaaggaggaatatattttatattgtgcaagtgcaatacctaggttcaatattttgttcaaaaagaagatgtgttattatgtgaggacaggatagctgttctttgtttatttcctctttgcatacatattcttggtactggatcagagcattctttgcctgaaaaatataactgaggccttacagcatttttcttttttgcaagtggaaaatttaagtttgggagagcaccttgttagttgctgtagcaagcatcatctttgaaaaatataactgaggccttacagcatttttcttttttgcaagtggaaaatttaagtttgagagagcgccttgttagttgctgtagcaagcatcatcttggaaagtttgtttagaaaaacatcaatcgtcagcagttcccaattgaatctctatcgctatgcctaaaacatattttcgctaattgcagtaccactacattggttgatttacgccatgtatctgtttttatttctttagagttttgattcaattgggtttgtctagtgtttccacatgtgcttcacttgtgggaaatcattctaaagcttgcacaaattgactttttgggtaccagcacacagacgtgttttgaggtctcagtttgaactttgaaattctaaaaaggtgtgtgttaacaagtcatctcttaaatgttcaatctattctatttgattcaatgtaggaaaggggggagcatgttccaccggaggattccttcgaagtagcccggaaagtgaaggaaatgtattgttacacttgttcagacattgtcaaggtatgatttggttgtaacattgtataatatacagctagtgggaagggggaaaagaaccttgaataagaggaaaaataaaagtttgaagttccttgtgatattgcctactctgcatgttgttcttccatcctgctcttgagttggagaatctgttctacgttcctgagaatgagagcaactaattatgtcaagatttaagctgcttatcatcctcttcttacatctgaggatgaaattagtaactgaggatcacttgtgatttattttgttgctacaaatgatttcaggaatttaataagcatgacaaagagccagggaagtacataaaacattggagaggtacaaaaccaaagacaggagcaccttattcatgtgatgttggctatgagcgatttcttggtcccgaggtgtgctctgcatttcaagtctctgataatttcaagctccaaggtcttcttgcagcttgttttaagctgaaaattatgtagctgttgtagacattgcgccaattgtttacagatgtatgcctcatatactgctgatttgctatatggcagagtgaactccaaaagttcttataatcaacataaaaaggcaacctggtgctagctcccgttatggacagggtccagggaagggctggaccacatagtcaacatagttatagctaaataagaaaacaaagattgcagaggtgatgcattatcgctaggttgggtgaacacctttctgatttaagaactggtttttgcaggttttcttcaatcccgaaatatataacagtgattttacaactcctttacctgatgtgatagacaactgtattcagtctgcacctatagacaccagaagagctttatataaggtaaagttattctgttgataaactatataagatttccgttaatcaagtgtccagcaatttgtgaccaatagaaaagtctcccttatatggttgagttaaaagtcatgatcttgatatcacactctttgaaataattcttctaatgtgtatctgaaattatgcccttgtaaaatactagaatattgtattatctggaggatccaccatgttcaaagacttccatagaagattgcaacgagatatcaagaagattgtggatgctcgtgttcttgcgtcagatgctcggttaggtggaaatgtaaaagtaagcatctatgctttaatttttgtcttaattaattaacgaatgtatctttggtttctggtacttaaaagatgcttgcctgctgaaaacatattcactcaggcacaaccagttgaagtgaatgtggtcagccatcctattcagagatatgcagtttggtttggaggatcagtacttgcttctactcctgaattttttgctgtaagttaattattcgatttctgttactattggttttataaccgcaacttaagttactctttgtaaatggctggtcagcgaagtctgacctatgtagttgtttccttatatcaggcttgccatacaaaggctgaatatgaggaatacggagctagcatatgtcgcacaaaccctgtatttaagggaatgtactgatactaactacaatcagtgaaggcatttcttatcgtcatattctcctcccaataccctgatccttgccctacttctcagcttcgatttgcaatcctacatctatgaggactgtgtatattaacaggttattggaggcaatgcattgtagatttcattcatcaactgttagaaaacaagattcttgtattctttccataggaagcacatctctccccttggcaaggctggttggcacttcaatggcagataagtttcacgaacaattgaacatacctcattttctgagtattcggttgagtctgagggctacaagtatacttagtttcatgaaaaaaataataagctgtcataagattttggggtttgattagaggatcatttatattctttttttcgctttaattgaaactctgaatgttatatagctacacttgtatattattctcttaattctttttccagaataatgtatatcatagattttgcatttggttcactgcataatattgttgtttacta

SEQ ID NO: 91 - DNA, 3266 bp, Solanum lycopersicum
  source 1..3266: mol_type = genomic DNA
gagagttatgagataagggctattgtaactaagaattgcaaatcttaatcttatcctaaaaaaggaaggatttgagatcgccaaagatgacacaaaaacaatacaagactctataataatctcgtaagaacatagtgataacactaatcctagaataagaaagatatatataattccacataaattttttagtatatcaaaccctttctcatataataaatcatgatactcgtaacaaatgtttgccacccccattagccgcttttttctttcaacataaattctcacttcaattcgtcccaaaaaatcaattatcatgccgatggatttaattcattgcgccataaattaggaagctgggtgttcagttagtgtggcaatcggaaatgtcgaatgttgtagttttggacaacggcgccggcgtaatcaaggctggtatcggcggcgaaagagatccaacagctattgtccccaacagcatgggccgtccactttcttccaagaaatggcttatggctgaccagcttctttccccagacgtcgacctcacttcagccaccgcccgccgccctttcgaccgcggttatcttatcaaccctgatctccaatcttccatttggtctcacatcttctcgaaccttctcaaaattactccttcacactcttctctacttcttactgaaccccttttcaatatcccttccatacaacgttcaatcgacgaaattgtattcgaagattttaattttaaggctctttatgtatcagattccccctctttagttcatctttatgaagcatctcgtcgcccttatggccttgtttctaaagcccagtgtagcttagttgtcgactgtggattttcctttactcatgcttccccggtagttcagaattttacattgaattatgctgttaaaagacttgatcttgggggtaaagctttgagtaattacttaaaggagttggtcagttatagaagtgttaatttgatggatgaaagtttccttatggatcatgttaaggaggaactttgctttgtctctttggatcttcccagggacttgcgcattgctaggtaatgctcattaatttcgatacttgttgtgtcattgttatcctcctgtggatatcaaagttcttgccattccgaattaagtgctgcaccttatggggtctgtttgctcttattttagtgtaataactagtttaaaaggatgggggcatgaacgcaggatgggtcgtgtagtgtactcgactaccattaagtagttcaaagggatctctagtcaattacatgttttggcccctctggaacaaatgtagaattaggatccttcaatgccgtgatgtttgaaccgctttctaaacttaaaacttagattaagcgagcagaaaatccacattaaagtaagatgatctttgagtgtcaaacatgctgggatcttccttattcataactactatgtcaatctcccaggaaaccggggaaggacaatttgtttaggtgtacgtatgttcttcctgacggtattacacatactaagggctttttgaaagaccctgaagaaccaaagagatatcttcctttgtatgatgaagctccgcagcaggtagcaggggaacaaattgatatggatcagctcgagaacactgacaattccgaagacaggaacagaaacaatggatcaaaaattgatttgacaaaaaatgtactttttccaagcccttataaatagctcgtcatcctctttccatttattctaatttatttgtatgaacaggaatttggcttaacaaatgagcggttccttgtcccagagatgatgtttcgtccagctgacttgggtccgtatcacagtgtatctttgacttgtatttcagttttgtgttcagttgaagaatctgcttcaataattcagcatttttttccctttcatgtgtattagagtgtctggaagtgtagctctatgaatttgtttattcacaagtatgaatttggttgtcagcatctcagttatttgtggcttacaggactgaatcaggctggacttgcagagtgcattcatcgagctatcagttcctgccattctcatcttcaccctgttctatatgagaggtagtgcagaatcatcggtgcatctcaaaagcttatctactaatattggtttatgtttatcttccttcttctaatgtcaatgtattgaatttggacgaggaagcattattctgacgggaggcagtactctatttcctcattttgccaaaagactgtaagaatgcagcctttattgcccattgctttaaaaaggctggatgttctatttgcttatgtcttgaaatttcatctaaatgcagagaaatggaccttcggcctcttgtcccagataaatattgtttaaagatcacaactcaagaagagtaatatactgtccttctggagaaactgttcaaagagtttctactactctaacatgtcttttgttactgtttgcagtcctattttaggtgtttggcgtgggggatcactcttggcatcaagtcctgactttgatgcaatgtgtatcacaaaagctgaatatgaggagctgggatcagcaagatgtcgaaagagattcttccactaacttttctagtgttatggagaggagaaattcagattttaggatgatagttggcctctgcagttgccaatgagctaaataccgaggaaattaaaaacagatttgctctgaaatgattcttattctagtctgtttcttataaatattgcagaactctccttggttgaaatctaacttatctgcaatgaaatgttgttggcatcttcaatgtgaatactggtgtcgctcgtccttgattgtagtatgggtgttatgttgcaacttgttaaggacaagatgaaattacacatatcattggctgtacgactacgacatgcggatcaagactgatggaacaactttggtgaatatttgtctgatcttattggaaatgatgataggatcaaatggactaagacagtttctgaatcagtcaaacaaatgaaactgcttctggtgattgcttaatattgttagcaggacaatagaatagttgattttcatgatggatctttaggatgtgtatgtactcgggactaactttttctgagtaaatactcgatgtttgtgcataacaaacttctaatttttgaaaaagtgtggatggactaacagaggcttgatacattaataatgtgtatagaagtttttactcgcgtttga

SEQ ID NO: 92 - DNA, 6297 bp, Solanum lycopersicum
  source 1..6297: mol_type = genomic DNA
gataaaatatatatatctggcagacgtattatccacgtgttgctcaaatcagtgtgtgtttgcaaacacgagtttcagtttcatgaagaatgagtgactattcagctaaaaactgttagaccctctcccatttcatgactggagccgtgccacaacaaccatggctatgttgttgcgcaaggtatgggaatccgtatctactcgttccacttcgagcaattccacctcaacttcgatctcgactgtcaattccatggatcggttcgaccagatgatgatgtatatacagacggcgtccaccggagaatttgatcggattccgttagatattttcattcaaattttgaagattttagggccaaaagagtctgctaagctgacttctgtatgtaaatcctggaaatacattgtttccgataatcgcctatggatttactttcttcagaatcaccatgagccttgggattctacttttttctctgaaactcacttgagatctggacctcttaggtaaattcctttttacagttctgctttttgaatgtcaaattaggtgaactttccaattggtttaatgtaatttagctgaactaatttgggacggagggagtagtagatgaaagagtgaagtatagatgaggatatcatgagtagctggtttgataaggtgtatgatttgtaggacgtttccaaattcagtaccagaattgtcattcatgagtatttatggtcaacgtgctcaagtgcccggtgctattattattgatggtgcgtgcctttctatgtgttacactcgatcttttagttggcatactgctctagttgttttttttaactgattcgaggataaattctaatgaaacagagtattatgtgaacagtacaaagagaaatgatttctttgagcttatttatctttctgatttttctcactaaaaggtgggtctggctattgcaaatttggttggagtaagtatagtgctccgtcagggagatcagcgacatttttggtgagctttcttatgagttaacagttgtagttgttaatttgtgaaaatcacttgcatttttgactatttgaggctttttttgttgttttaactacttgtattgttccatgtgctcggcaaattctcaccctaatccttcctgaaaaattgtaccattgacaggagtttggcaacattgaatctccaatgtattctagattgagacacttcttttcaacgatatacaccaggtttgtgttccgttcatttttggtgtcattttacattggtcccatatgacaacatccacctaaaccaacatccattgttgagcaatctaaacaggtttttggttctcaaacataatttgattttcataaaatgctttttaacaccatataacaggcctctacgatattttttacattattaattgattgtaatacggacatttggttggcaaagaagaatctgcatcaaagttttatctatgaaaggactctctgtatcattatgttgtcaatgtggcacatatcctgattgtttatcatataattcactaataagatttcctctattcatataataaatcaccagttttacccacttaagagagcaaaaggtataaagggctggaatcacaatgacttccagaatttgactaaaacacctcgcatcttttttagagtactaccgtatagctccctacaaaccagaactagaagataagatatgagcttgttccttagacccaaggttgctggaatccttttataaatttctctcttctgctgttatggattctttgcaggatgcaggtgaaaacttcaacacagccgatcattgtgtccattccgatttgccattatgatggtcagtttctatttgggcgttgctgaaaatccagtcaaatttctgtaaatataacgtatcaacgactcaatttgttgtttagagggcaaatattatttcacaatatatgcatgtgtccatttttacttgatgaatcagctcatgcaactctatttttgaacattcttccatttgacttttgagcaagagggtaaggtgctaaaaggtttgaatagttatctcactcaattaaatcttcaactactaagaagtgagcatagtaagatcttttcagtgcaccaaaccaaggccttcctttttctttctaacttctctttacctatacagatactgaatctgataaagcagctagaacgcagttaaaagacgcgatccattctgcattatttgacatgaatgttcctgctgtttgtgctgtcaaccaggtagtacttattcatttccttcaacttatgttggattcccggaggtgattaaagttgttagttttgataatcttggttgttcttttaaaagttctaagctcgtagcaaaactttgttagataacaatcttggttgtactcttagaagttctaagctcatagaagaactttgttagattgaggaagaaaaaacatttatgtcattgttgagcgacatttatgaacatgttacatataaagcagaatctgtcctttcataagctagtgtacatctacagataagcttttctttcacagttatcgtgtgcctttccttagtcaggcattcacttgcttgttgttgtggcatgtcctggtccttaggtttattggattttatcttcttgccttagcattgggccacttagggctgctaccaccaatttaatacatacccatgtaccctcatcctaatatatttgacttcttttgttaattacagtagttttccatccctgaaaatgttaattaacataaaataacagtacatatttctcttatttaatggtcatggactgttttcagtcaaatagccccacttctcactttccactaataatatcttaaacatatttgactaactaatgaagtacttgatgctttatactgttaatggcaaaaactaaacattaataacatggggagagaaaatgatcaaaatgtcactaacttggcaaacttttcctgttctctttctaagattgtattatacattaccacgattcttccaaagttttagacataatctgattttggatttataatagtattatgatgtctttctttcaaaaactataggctgttttagctttatttgctgcaaggaaagtttcaggaatagtagtcaacattgggtttaaccagacatctattgttccaagtaagttttttattcatgtactggacttatggttcttgtttgactttattgtatacttgtttttgtagaactcattcatttttaattctttgaactgtgaaagttttttttttgttttttgagttgctagtaggatatttagaaactgagtttgtattctccagctttctgagttaatcagcggtgaccagacaacccctgagatgaatcacagatgggttccaatgtttcttgttaaactaatttcatcttacatttgctttactccttttaaattaccttatcaaaaagaaagtttgtgctctctaattgtttattctttctgatgatttaatttactcttaaatttcttcatgaacaacgtacatggattgcatgtttttatttctcttcgtgtctgcaatttgattgcattgtttcaataatttatgtgtagccactttttggtcttttacagttctctacggtaaagtcatgcaccaagtaggtgtggaagttgtgggaattggagcattgaagcttacaggattccttaaggagcagatgcaacagaagaatatttattttgggtcactttacactgtgcggactctgaaagaggtatcaactttctgtcatagaacatttagggtgggaaggaagcgggtttcacttagacatgattctttgcactatttctaccttgcaagtgaaaagttactgaatcacttcaaaaatatgccgtggtaacatttttgttactggaaaccatttcgttgtacataaaattttgaattgccgcgtccctctactgccacatctagatactaacaatcttgagaagtgcttggtcagataatcatagctccagcactactgcatatgcactagctgctgataacctcaataaaccattaaatgcatatcttagttgtgtgagttctttgtgactttcttcttgactacacattgtcgaattacaataatctgtaaagtttgcaaagtaatttaagttctaagttttccagaaatttatggtatctgaagaggaaaatgtgatgaacaaatttaagagttattgcagatcttctgcttcactttttcactatattttgtttatttaaaaataaagatgttattagtgtacaatttctctgttatttttatcttagtaacataaatcatgttagattcagttagttttgatcctgtgacaaacatagacttgaaaagcctagctgcatgagagttacggttacttttaatttcttagtgatgttttcgagtattttctgaggtccatttggtccgtattgcagaacctttgttatattgcacttgattatgaagctgaactatccaaagataccaacgcatcttttcagatcgggtctgaaggttgctttacactttcagaagagcgctttaaaacaggagagattttgttccagcctcgcattgcaggagtgtacgttcatattaccttatttggacttttagtaagactattgaacaactccagtttcaattacttcccttagggcataaaggccttttaaaaaactggagtagatcctgcacatgacaaagtgaatttggactatgtagtcaattggaaccttgttgcatcaggtctttcctgaaacttattttcttaaatgcgaatggagagacagatttgtactcagggcgggtgggggcagttctagacatcgtattctcattttgagtctacactctactatggtcaactgatgatgccggtttcttgacttatatcatttagacaaagtggtgtttttgtggatgcaactggtgaaacacaactgacccccaccccccaattacctcaaaaaagaacaaggatctgtagtatggaaaattagtagatttgcggtcttgtttcaggcgtgctatgggtttacagaatgctgtggcgctgtgcatggagcactgccatgacgctgaattaatggttgatgatagctggtacaaaacagtagttttggctgggggaagtgcatgtttgcctggattagcaggtgaattgcaactgatgctctttttccctagataatgtatctgatggaatcatgtgtttgtacatgttcttctaatttaggaaagtaaagatgagaaagtgttaatagacgaaataaagaagaaatgctatcttcaagggaagtactgattttttttattatgaacattgcagaaagattagagaaggaagtgtgtgaacttcttcctccatgcatgagtaatggaatcagagtacttcctcccccatatggcgtagattctgcttggtatggggctaagctgattggcaatgtaagctaccttgctcaacataatttgttgcagtagttttactctcttactcatgcttattggcaatcttgactttgacatggttccttgaattgaaaacttagttaattccggtaaaaatcgtatattaaatttgcattttaaaaggtaagagttactctacctgcttaggtgaacatgccaattctttcgattgcctcttggttagttgtttttttgttcttaagaagttctgtatgatttgactatgatctcttcttttgaggggattggtgtggaaaaaatgtgtaattatcatcaaagtgacaattagcatgtacttgatcatgaatattttgttcttgctgtcattgaactttttatcatatacctgattatgatacaaattctttgtctgtttactacagttgagcaccttccccagttcctggtgtgtgatgaaaaagcaatttcgtcataggtcgagacgcaagtttatgtggtgattactgttgcagtggcactgcaggtggtattgccaaagatcaagagttttgatgtgcctcgtggctgaagatcaactattgcatcaatgattagatcatttgttaaagatataaatataaggctatttatacatcaagtgtaagactaatttatgtcgttcagtcatgcggatctgctaagcatatgatgtacaaaatcttagattattgaggtagttccaaatggagtgaatatctgtaagttggacttctagacttataataaaggagcacctttttcaggttatgtgttaa

SEQ ID NO: 93 - DNA, 12628 bp, Solanum lycopersicum
  source 1..12628: mol_type = genomic DNA
cactgtgtcacccaccattcgccaataacaaaagcgtaacttatttgacacctttcccttaattttctgatgaagctaagctagggcaacagcgtttagaggaagaagagaagagcaaagagaaggagaataaggcaaacaagggaagaatgcctttcatatcgaaaatagagaggcaattagattacggttccttcaactcaagtcaccctattgtcattgacaatggcgcttcctatttccgtattgggtatttactcctaaatctcccaattactctctctgttttgtatctgtatttcctgtgctttagctccgcttcttggtaattcacaggtgggcaggtgagaatgaacctcgcgttatcttccggaatattgttcagaggcctcgtcacaaaacgactggtatgtttatgtgtattaattggagccacatttttcatgattttactagactaggaacatttagattataaaggaaaatgcaaaaataagtgtgttatctacttattttgttgtcatctctatttattggacgggttgggtaggggtctgagctagtggagtgaggttgaaaatgaagtgtgttggaggattgggaggacaaaatcgctgcggaatgctatttgtaaaacttaattttttctactttcgctaggaaagtcatttcttccgttttaaggaatctgttttcttagagaaactattttctaaattttttgaagtaaggttaattggtactacccaaaacaccctaagttagctaattgagaaggggtgtgtgattcccagtgggtttaccagttgtggcaataaaacaagtgatgttagtattttcaactgtttgacttgcctctagatttctatcttgttaaatgttaatcctgctgcttttactttctttttgataagtgaaaggaacattcgggaggtttaacttaacacctcttatagaatcttcacaatttttttccatgtaaaaaagaatcatttcttgtttctgagtgtacctgacgatatttattcatggatcaaaaattcaaacagtcttcttgatcaggacaaatgtgggtcaaccctgaaagattccacagaaggccatggaaattgaagtaattattaaagtacatggaaccaataacaattacaacataatgggaagttagtttagttaccattcacttctcaaatttcacataaaaaaataacattacattcacttagtaagtttgtattgatcaaaacaacatgtaacatatgaaatgtgaaaaaccaccagtgaacgaaaatatgagcacttgggctttctttagaataaaaatgaattggttgggtcagctattgggtctattttggctggttggattcaaaactggttcagattgctaattagtgttttaactatttttttctcaaaattaaatttgccaagtgctccagctcacatgtgcatccttgataccacctggcataacccagaggagtccaaaagaagataaacgtgttccaactatctgctgttattgtgcaatgtccttatacaaaaaatagaggtatttaagtcgatatattcatcagacacatgtagcatctattaactgtgcaaatggatcttctaatcaggttgtcttgagttagagttgcttcattgagtgcattcaattcaaacaggatgtctaaagtactctcgattctgcataactggaacattaggttgagtcattaggcttgttatattatcctctgtgatggatttctcttccgcacatgaaggataggattgatactaaaggcttgtttagctaatcatcaaacgtttactgatcgtgtaactaattgatcctttggtagttgatgtaaaaatgataactcttttggaggcaatgtcaggaccagtttggatggtgagtttactgtaagtttcgaatatgactagtgcttaattatccaattatgattaataaagttcaataatgaagtacacaagggtatgacattaaggtcaatgaagtttaaatgcaccaaaggcgactatggttcaaatccttttagaaaaaaaacagttaggtgatttcttcccatttgtataagtcttggtggatagagttactccatacctgtgccaatggcacttggtagatttatcgaggtgcgagcgacctgatctgaactcaatcttatttaaaaaaagttctaagatgatcagattatagtgaagtgtttggtgaagaaatgatctaaattacttcgtgctaaacaactcctatgtagataatattaaatagttgaggtgcgtgagagctgtcctggacagaactgttttcagggaaaaaaagttcccagtgaacagtctgtagtgatgtttggtcaagaaatgatcaaaattattcttgctaaacatcacctaccatgaacatgtttttaaatactgaatgcagataatacatcatcatttcataggtgaatattagcctcagggttttattatgcttaccttatcatattgcaggtgaaacagtaacagttgttggtgatcacaatcctgtgctactgaagtactttgattgcacgcgttcaggacctcgctcagcatttgagagcaatgttgtttatcagtttgagataatggaatatgtaagggttttctattttgtggggatagtatttgggtaaatggtttttctatgtctgtaagcttgaccatgatatttgtgatgtcaataaattttatgcccgaaccccctcccctgaaataaagatagaaagatctaaccatctaccagagtatgaaactatcaggatagctgacaatttatctagacattaggtttaactactgtgttctatgacccgttcctatttatcaggagagaacattctctttggattttaactgtaacctctttggatgttaggccaagctggctaggcaaattcatgatttaattttagattgtcaagacagtgcaatctgactagaatattaatgcacgacctattgtaacacaacacttgtcaacaatgatacattccctactttttgctggcactgatgccatacatggtgttcttggtgtagatagttggatgcataaattttgtttatgtgctgctatgttgctaacctgagtctgacatatgaaacaaatgatggttagggattactttgtcttgtgtgcattattcatgtttccgttatgttttctgaaaaggtactcatgtcacattatgttttccgtatgtagatcctggactttggatttgatcgattaggtgctgatcagtcacaggtatatgctagctttcatccaactttttcgcaggataagatagacccgatgtaactatattcagcttggtttgtttagaatcttttggttcttactttttcgacagaagctctgaaatcattgttgtggcctttcctttgactattgcttctctttgatataaactgtctttgttggtctttgaggtttgataattgttgtcaattgtcaaattattttgtcttcttttttatcttttatcttacctcataatttttatccaactgtagtttctaggaagcataaacaggatgcaaattgatatgcttacacagaaaagaaattgaaggaacgtggactaatcaagcatcatataaggtccatatagttttacatatatgtcgaataaaaaagacacctcataaactcattaaaattggcagaaaaaattttatggtaaaagttgtctgaccttaacgaaatatttatactttacaaaagtaagttgtatggtatgtactatttttggaaaggggaatctccgacattatcctcttttctcatctctctctcttttcccccttgtaagatattccgtgtcaattgatgtgcctccatatcaagtcatggccttaaacaattggatgatgaaatattgtcgcgattgcattgcaaatatataaatgaagagatgcacttaaagtttgcatacctttgtttctcataaggcgtacacattataccatttatgtacagagataccactattcaagctatttgccctacgatccatcttttcacttccaaactgattattttggcataggtaatggtgcatagcatgtatatttggggttcagtgggtgatgtgacagacagtcagagatttgctactgatatataaggagagtatgagacttgactgctctgtcacttatttagacaatatcgagagaggaataaaattgtgcaagggtgttgaagattctttttgaagacataaatgaaacatttttctttttacattgtgaagatttggagcacatatgatggtccagtcagctgcctagatgctctttctgcagaagcctatccttgtgtagaattctccaagtatacatcctcagttccctattatatcataagaattaagaaccattatctttattgagaacaaaataatttggactggcaaagctaagatatttaaaatatggtgaaaggcaaaccctgattctgtgccttgaatctttgctgcatatatcctgttgttaaacttcagcttgcagtcccttaaaccaatacttattcaaattggtggcagggcagattgaccatcctatcttaattactgaatgtgcttgcaatccagttcaatctcgtggcaaaatggctgagctgctctttgagtcatatggagttccttcagtaggtatggtgttcatgtaatcatgtcgtcttttttatcatcctaaaccaaaaggttgctttgttttattatgaccttgttaaaagttcttttattgatgacaatagttacttggttcacttgaccaaacaacagtttgttgttgataattgagagcatgactttctgtggcatttatgatttatgtgaacttgttggtcacgataggcatttttttttctgtcttgaagcattcggtgtagatgctgcattcagctacaaatacaaccaacagcttggaatttgcaatgatacaggccttgcaatcacctcaggatttaccacatctcatgtcatcccggtatgctttcgagtcctatcatgcagctgtaatgaattgacatagtagtagcattgtgcttttatctatttgaaagggttaaaaaattatgggtggcgttgacatggtgtgaccatctcatgtaaaaatttaaaatggtagagagcaccttttaatcttccacatgcccctcacctgcaggcttgattccattttaatgtgtcaaaaacatgatattttattttgataatgaatggcggtgagactagagcccagaaccatgtttggttttatataatgttattcaatagaccttgagtatagacaatcctagtcccacactatgccagtattgtcaaaagtgaaaagcgctaaagccctgatgcagcttaacgcccaaagcgcactaaaagtgtgggcttcacttagaaaaagcgcaaatatatacatacatacatacacacacacacacacacacatatatatatatatacacacacacacacactctagataatgaatggcccgtttacgggcccaatattacaattttataatctaaatttgattaaattttaaaagaaaaattattatgatattttgaaataaacatggtaggaaataacaataaaacataatatttattaaaaataatgaccgatgaaaattataatgaatcatctcattctttatgaagtaatagaagaatgaaaaaaaaagttatgactttggtcttaatatttattaaaattaggagaacaattttgtataataaataaagaattttttccaaagtagttaataaacatgatggattaatgttttatatcaaagaaagaggatttaaaaatatagcaccagttgatataatatatactgcagtaatttaacatgaggtagttaatataataatttatataacttgcttaaaatgatttgaactatgataaaataatagtaataaataaatgtatgtttttcaataaattaatcatgtgttacgtgaagttttgagattatacataaaaagagaaatcaagttaattagatacttcaaaaattatctctacaatccaaaaaaaaaagcaacgccatgaaattgaaaagtccgaagagaaccagaggaaatgacataacatgcttctcaaattgttgaaaatttttgttcttgaagagttatctcacttcactggttccttttgaattaagcattttgagaaaagtaattgtgattgaaattgaatttaacatgttaactgatagggtgtctgaaaagtgtggattagttgaattttgttgaaagttgagtcattatagagagaattgatcgaaatgtagtttttaatgttgaaaaagaaactgcattattggttttcctaataagagatctataccgaagtgtaatacttaggacgcaacaaaaaataaaggacgaaaaaatttattggtataagacatgagaggggagaaaattaaagaatgaatgaaatgaagaatgaattaatgtctatttatttgtgtcatagactggttctagaaaaatcttataatttgtagttttttgaaaagtcatgtaacttgtggaggaaatttaccacttgaaaattttgttttaagtgaagtttaaaaatacaatttatagtttttaaaatgaaatatatatgaaatgatcatattactgtagattgtcctcaacttttaaaatcaaacacatctttagattaatatgtttgaaatcaagtaaaagtacagatttgatgatatattttaatgaagaactacacttttataatctagtagtttactttaaatacaaatatatcttcctacacattttatttgtaaagttactttttaacatcttttaaaatatatatttttaaaaatattgaaattaatttgaattattctttaatttcaatctaatatatattattaattttatcgtacttgtttcttttcaggttcattaattagagtaaaaataaaggttaaaataattaactatatttttaagtaatgaaattttatgttaaagtagacctttttagtaagcataatgaatataaaattattaggaattaattagaataataattaaatagagtaatgaatagatatcacaataactcataaaaaatgtgaagtgataacaaaatgtgttgataaaaataacattaatcaaagatgtttatcaaactatttagtttcctgttattattcttggtaaatttttgtaagtatgaaataacatttttacccttgatcaccattcactttcatatacaaagagatgtttctagaattatttgtctctcttgctatctttattaatagatttttattagtataaaattacatttttaccctggtcgtcctaccacttcactcttctatataataataaaataaaattatatatatatatatacatacatacatatatatatatacatatatatatatatatatatatatatatagagagagagagagagagagagaacatcatagacacaaaaatagtaaatatgtagtgcttataatgaagtttgttcatcaaaacatgtgtttcttatatgttctacttctaataaaataatattcttccatatcatcttcctcaatagggtgattctcattggtatcagtatcattagatttatagccttcaatctcttcttcccctgactcatcttaatcaactcatcttctgtcagcacgtggagctcgggagcttgagccattatttgtaataacttccgaccgtctcttttgtcgccttgtgtatgtcaacacatcctcactgttcgacgctcttgaaacatcaccccaagttaagtttgtcatcaccaaacaccaattcatcttctgcttccatatttttacccatcttcccagccaaccattcattactatgatcaatgttatccaacgaaatggatcaatgacactccgcaagtcataacgagctttaaagcacgattatacgtagcatatactagatcattcaatcttagatgctctagtctgtttctttttttggtatggatctgtgttgcattggttagtgttagtaaattagtctaattggttaactatgcaaagaaaaattaataaatatgatgtataccactacgattacttagtacttacatgctcaaacacactccagttacgctaacatccagcagaactagccgtaaacccaaaattctaatggctaattattggagattgggagctgaattaccatataaattccaccattcaactgtaaaagagttatgtagacatcattaagtataagttattacccaagtactaagtaagaagtattaagtaaacttataaatataaactaaataattatgaaatctaaatgttattgtattcacttaccaggagatcttttcgttctagatctttttgcaatagaaaggccaaattgttgttcagctcttgtgtgcaatggtatctctgatatgatcttgtcttgtacttcagtgctaggaaccgatttttcaatacaagcatacaacccatctgttacttcttgacaattctcaatagctggattttgaaagaactatttattcttagtgaaatcgctcattatatttgagattcctgagtatccataaatgaaaccgacaagggcaattgctttttggaaggtcttcttgatgataggaatcttccctacgtcttctaacataagatctatacaatgagctgcacatggcatccaaaatatgtgtgctctttttctctgtaacagttgacctatagaaaaaaaagggtaaatagatatgttaaaatttagaaatcaagactttgatcgatattagaaagtaaaacataaaacttagttttttaaagcaagatattcttaccagctaacacaaagttgctcattatcacttacaatttgaaccacattctgatctccaacgcgttccacgtatctatcttgcaattcacataaactattgggttggtttctaggcatggttatagatatgagagtacaaaacaaagatagagaaggaacaatgataaaagtatattgtatagtagttgtagttatgtcaaagaaatggttgtctactaagctgtttggaatatttttttttcatttaattcaaagaactttaagatattttcccaaagaattaaaatttaatcagcaattctcttaacaaagttaaaagagaaaggactagcgcatttgggtttggaatttttcacaatgcagttcagatagtgcaataggccttttgggcaattatcaaatcaaaagttttgatagatagtgaaagaaaaaatagttgtctgttgttatgacttgaatgggaaattcggttggtcggactgcttagatacgttcgtgggtctttatctttattttcacttgtataaattgataagttaaaaaatgagacggagttctgttagtttttaagagtgaaaatgacccacttcactaacagcaagggcaaatttgggacaatttgcaaagaagggaaagttgccccatttttcatagttgaagggcaatttggcccttttagcatttttcagcaggtgtatgtgaaagagataaatttaagaccctatgcactttcaggctaaatttctgcttggcatatcatgatgcagtttttgctagtggtaggctctcatttctcaaatatatgacatgatttgttttattttcagtttataaatggagagcctgtctatgaagcgtgctgtcgaactaacgttggtggataccatgtcactgattatctgaagcagcttctttcactcaagtaccctcatcacatgtaggtgttataattcttcgaaagtcatgatgttgctatgaacttttggctgtttctcaggcttcatttcttaaatgcttaaacagatcaaagcttacatgggaaagggttgaagaattgaagatggaacattgttacatagctgcagactatgcttcagaggttcaactatttcaggtcattagaacttcgtctcttccccagcctctctagtctgcttaacggaggtaaaatattttattttattgtgtcagaggggggataaagaagctgaagataaaaccagatgttggcaacttccttggtctccatcaccagtcgaagagcctccatcagaagaagaaattgctagaaaggcagctttgaaggagaaacaaagtcaaagattgcgtgagatggctgaagcgaaaagatcctcaaaaataaatgaacttgaaaatgaattaaaaggtttggaattcctcttagaggagctcaaggacattgaggaggaggatgaaattgtgttgttccttgcgagtagaggttatgcttctaaacgtgaagttgaatccgcttttgcaaaagttactcaatcacttcggaaggccaagggtgagcaagttccaagtgaagagaaagtggatatttctgcagctgagaagtattatctcattgatatacctgatgatgaactttcggcggagcaggtatgctcgtatatcgccatattgttagtcactgttgttgggcagttgtatattgaaaattctttgtgatggtgaagaactcgatatccaaggctttttcctttcactttctgaatattgtggtgttacattaatgcacttcgtatgagaaataaactcatgtcatcgtaatgttttaaaagctcatcttttgtgagatactatactgtaattcccgtatgctgtcacttaacttatctggtactttatgtagtagatttaaaacaaaaaagagcttttgcaactaaatttattgttgcaattgtctcttccattttactcttggccagcattgtgcacaatcatcttccatttattttcattttttgagattaaaacttttcaactgaaaatggaaatacttaaacttgttaatagctcaaggagaagagaagacaagtgttcctgaaatccacaactgaagcacggcaacgagcaaaacaaaggcgtctggaggaggagttagaaaaagagaaggaaaagaaacttgaggaacaaaagcgcatgtatgttatatttcttgtcagataatacttgagctagcttattgtagcattattcaacttgtttacaatgagttgttgtagtatctacttcttctcaaaatggatatatgtatttataaagttgaggcgaaaaataatatatattaggtacagtgttgctcatagtcgtatatttcatgtttcagtacaccaacaacaacaacatacctactgaaatttcactaagtggggtctgggagggtagagtgtaagcagaccttaccactacctcgtgtaggtagagaggctgtttccgatacttcatgtttcaatatctttttatttcataaattcatcttatgttgtgtagggaaaacccagaacgctatttggagcagttgcgagccaaatataaagagctctctgaaaaacttgagcagcgaaagcgattgaagacaaatggtaacaatgcaaatggcaataataatgtttctggaggtgttggtcgcggggagaggttgaatgctgcccaaagagagaggatgcgactgttaacaacagcagcatttgatcgagggaaaggtgaagatacatttggtcaaagggatgaagattggcaactctacaagttaatgagtagagataatgacgatgatgacgatgataagccagatcatgatgaaactgagttggctcgcatctcctctaggcttcaggtcagtatgttttcttgacactttgtttggcgttagtctctgtgttggattgttctttaaaggtgtatcctgatgtaacctatgacaggagatcgaccctacattttttccaggatcagaatctggcgcgtctgcctcagagacgccacgtttccgtcctctaacaaaggaggattttcaaatcatacttggggttgaaaggtttagatgtcctgaagttttattcaatcccaacttcattgggatagaccagtcggggttggacgaaatggttggagtgtcattgagaaggttgcctagttgggtacaagggttggaggataaaatgacaagttcaatacttgtgactggcgggagttgtctctacgcaggtgtgggtgagcgcttggaagcaggaattcggatgatcagaccatgtggaactcctatagaggttgtcagagcaacagatccaattatggatgcatggcgtggtgcttcggtttatgctgctgctatgcaattcccagagcaaacattcagtagaacggattattatgaaaaaggtgaagattggcttcgtagatacaagttcaaatacacaatctaattggaaactgattaggtttagtacacccagcgcaagctatgttattcgaaatcgtgaacttgcactatggaactgttcacgagctaattgtttgttacacctgccatttgacaccaaaaaaagaagaagatatagttaatgatattatatgacggttgtattaaaaattctactgaactatgcagttaaacgcagtttcatttcaacatctaactcacaattccaaaattgataattcaaaagaggtgttttgcttgtt

SEQ ID NO: 94 - DNA, 13688 bp, Solanum lycopersicum
  source 1..13688: mol_type = genomic DNA
actaagctaatctaaagagtcacgttaatttgtacacaaaattgagcaaattcaattttcgggacaattccaaacagtatataagctaaccccccttcttcatcagtaccgttttctgctccctcaggcctcagcaccagctcaagcttttagccatggtgctcatcttctccattgctacacactataatcttcttctcaatcttaacaatttttgtttctatacacaggattaccctaaaacagcagttcctactaacatcttcactgaacgcgggtccaatatcgtcgtcatcaatccaggtactaaaccctaaattctcctcgatttccatttttttttgctttttctattaactaattaagtgaaatactgtactgtaatttaggttccgcaaatattagaataggattggctcaacatgacactccattgaatatacctcattgcatatcccgtcgcactagtcagttaccgaaacgaaatgctcaagatcaagtaaggccaatttttttgaatttttgtagttaagtttgcagttttatgtgatttttcgcaaattttagttttgaagttctaagtcatctttagtttgttgatcatattgcaagtgtgtatgtttatgtattttgatgatatccttttctttttttggtggattagatgctgaattctcaggttacgactgcacagcatatggaaagggaaagagcttatgacattgtaagtatgatgaaatatggtaaacaatgtttaaattatatatttgagcttgaaaaaaaaaagatgtttaatcatataagcacgaatatgaaactatataggtcgatgacatcaatacattgtaatattttcgatgtttcactttttttttaatcaggttgcgtcattattgagaattccatttttggatgaggaggtagctaacagttcttatccacgcaaggtaccagggataattctctatgctttttaaagtataatatgaatttttttttctttggttctgcgggattttcaagtacatgtgtggtaaggagtggttattggagctattgaagctagattttatcaggaagattttaatggaatcgaaactagttgaactacaaagtatctatagccatgctttctggaatacctctatcgacaatcttttgtgtgtattttgtgtttatctgtgcagatggggcgtgtagacgcatatcctccgcaaaataacatgaaagagccagtgttcacttggactgatgtttttgagagaaatgtccctcattcttcaacaacaggtaagtactgtaacatgttcattctttgaattaagcatttattcgttcaggtttggctgttgcattctctatgctgaaagttataggtggtgtatagttttcttgtaaaccagttatatgtacagatacacaatattttgtatggagtttgaatactcttttagtctacaactcattcttctttgtccgcaagtgatgccctagccagttagttggttggcaagtagccctatgttccagctggcatgaaaatattttctgctatcaatgcctaaagcagccgaatggttccccatctataattctattagtgcttctgtggatggtctaattcatattttctgggagatcttttagcgattagatatcatctgatatcccgtgtcaagcttctcagatgaccaatgagcattatgacaaggatattttgcggcaactcttccatagttgatgacccgatcttaaattttggacttgaaaatatttttctgttctcaaaattttacattaaggacactttgttcggagagaatatattttctgattggcttagcttttgtttgattttcagtagtagttggtactagaacatgcttagtttgtttattttgctatttacacctttatttcaagaatgagtaagtatgttttgcaatagcagaagatgtacccaacgaggacgataccagcgagtcacccactctgaaggaaagcaagattaaggttgaacctaattccagtgaacgtaaatatagagagtacatatgtggagaggaagctttaagaatttccccaactgaaccatattgcttgcggcgtcctatacgccgaggtcatctgaatgtatctcaatattatccgacgcagcaggtaacattttgtttcaagatttctttagatgcatggaaaatttgatgtgcatctgcttcttccagttgtgactcacacattagtaactatacttttgacatcaatgttggatttctctttccaattttttcattgagcattggcatgattttctgaaaacttttctgttgatttttcgaaaggtgtataaatgtaacttctttcagattaactagagttacagtggccattattttataatacttggggaattttaggttctcgaagacctgcatactatatgggagtggattttggatgagaaattgcatatttctcatcgtgagagaagcatgtattctgcaatccttgttattccagagacatttgacaatcgtggtatatatactctattttttccttctcattttttctgtctgaaaccagaatctggtaaatttatgtttaggctagaatcttgttattttggtcaaatctgcaatttttgaaataaatattataaggtgcatgcaccactagatcctggaatttagctgctcatggtctagctagcttcgctaattcacgtctgcataaggtctcttatgtgtttctcttagttggtttgtaaaaatgacatactgtcatccacgggacacctgttttaattgaagaagcaatgtgaagttccagtgttctagagaaagtaaatactccactagttggactatcaagacagagagatgtgtgtgtgacagtaggaatccccagctgctccatccttgatgggcaggttaccaacatttgtgcttgtgtgctacagtaggtggactagctcagggttgcgcaaattggcgccaaacaccactatcatttaaaaaaaattgtgatagtgtgttatcttacatatgtgctgtcctgcagactgaaatgagaataatgaatttaattgacaatatattgagacgaatccaaagagctgttctggtctcgtttccactgattttgggaactggaaggtaaggcaaaagagagcagaagtatagtaagtgggtaaattgaagagaaaagggaaattaaaatttgtaggcccaaaaggaaattatatccccatgttccctcctcttcctactgctaacaccaaatgatgaaaaggaaagatcagtacttttcctctgcttccctgatcttgactagttttccaagcattgaagttctccttgcctctccaaatgctgaagatagtgatccatcataaaatggtctctcagagaatttctctactcatcaattacttggatttggaattaggaatatcggaattcagagcaagaactttgaaatagggtcttgttgtccatggagaagcccaacagtttggtgaagaggaaaatttccctatggtttcttcagattgtcattttaatttcttttgtatatactggaaacaacctttctaccccacaaaggtaagggtaaagtccgcgtacatcctaacctacctaaaccacacttgtgggatgacattggatatgttgtttttgttaatgtctaagagattgctgttaagtgactaatcttctgattaggagtgggaaacaggcggattgagtaggatatggacaagtcaaaaacgagttaaacaaaaatggataaaatacctgaccaatcatatttaacacgaatggaagataggttactcactggataatatggacatccttattcttttatcaaaaaaaatatggacatccttattgtcgatattatcattgtggaatatggtgggtctaaattaccccaccaaagctgatcaaaattatcattatcatagtatcaagacaatacctactataacatagaaccaagagagctcattttactagttttatgtactactctaccacattattttgtgggggaaccaagagaatatcaactatttcctttgaacaatccaacaatgttaatatgcttatagttcagttattatgtcaaaccacattcacaaatttccaaaagaaatgaatttagcaaggcattgtgcttcctcgcaaataaaagtatttataacctgcttctttcctttctttctaaattctaggaaataacatagtactatatgactgtagcctatgtttaaaaaaaagtatatgatgtagcctgtagtttaatctactttgccctttaaattaccaaatcttaagtggacaatatagattgactcatatttaccatatgatcaccctttccgtcgttgatatagaacttttgttccttatagaaaatgtaacacttcttgctgtttatgcaaagcagaaatcaaggaaatgctatctatcgtgttgcgtgacttacggtttggttcagcagtagtccaccaggtgatattatgttgctgaactttttaggcattatgaagtgattgtatgtatgcacacaagttggacctaagccttcattcttattaacctgttcatataattttccaactaccgacatacatgacagcattaactttgaaatatatagattgcttcattctatttttttgaagatctgataattgcttgtcccatgctttctaatcaacaataataccaataaagcttgtgtgtaaggtatgtatttgttaagtatgatcatagaagaacttacatattactaccctcattgcaagtttcttgatagacttgctgcactttctaaaaggggatcacgtttagttttccaggaattttaagcttacttcttgaaagttggtttaaggctattttgatgtagatcaaacttaatacatttcattttcagttacttaaggagaataggaagatttatcttgtacaccagtacgtttagcaataacttgcccaacgattggcccactttctttcttatggagcacctacttcttgatgaaattaaaaaagaagggtcagaatctattaaaaacacttatttatttgaagttgcactcagtgggaggaggtgtggaacggtgaataaatctctgttctttttaaattaataattcggctccccgaaatcctatgtttagggtgtctcatcaatgttttgttttctccatcctagttgtctcttatgataatccaagatctaaattatttactcccctcggttccagttcctgtgacaattttttagttcggtttaaaaaaacccggcagttttataagttcggaaatattaacacaaaccttctatttatccttaatgacaaacttttatcgtgacacgaatgttatggcatgtttaatgctacaagctttaaaagtctcccttctttgtgccattagttaccttaggagggctaaggaagaaacattaaggatgtcaagaagtttgctgaaatagaaaaactttactcttgaatatgcaattgcctgttcttggaaatgcagatgactgtcaacaactaactggaagtgctaactgtaccttgtaatcaacagtagggataaaaatggatgagataatctttttcttttgactaccgggaaatttgtctgaccgtcctttggaccaatcacaaccatctaaactcggtgaataataggccacccctctacccttctccacttaaatgccaggcttcgctttacatggtgtggggcttgaacctgtgacctaagccacaaatcctccaccttttgccactcgagctaggccttgggggcaaatgtatgaaatcatctttgttactcatgttctgtttcaattggttaaaccaggaaggtcttgctgcagtttttggaaatggtttatcaacagcatgcattgtcaacatgggagctcaagtgacatctgttatctgtgttgaggtatggtggctttgtttctacattctatatggttggaaagtaacaattaagtcccttttttgttacagctttgtttatagcaccccagcattagaatgggacccaggataaggattctaagtaactttgatactggcatactgcaagcgtttttccttgtgtgttgcggaagtgggtggttataactggacatgaatcatgataacgttccgaaagtaattcatgttactgaggcatcagtcttcacagactcacagtaatggcatctatcctctttatttcttaaatagattttccgagcggctctcgccacctattgtgaaaggccatgaatcatgattagtacatccagtaccatcagtgctattgatgcacacccaagtacaagaaaatttctcattacccatagtctcaattctaggtaaaattatacaagaaaattgggattctgagagtgctattctatcactggcatgatatctttcattgtcattacttcactgtgattactgcttcaccttgatctccccaattgctctgtcagtgccttgttatctatgtagatgacctacagtctatacatatgttgttacttaaatctggaagtaaaaaaaattctgtgatattcttatgctttttaacaagaacatctgaaaattgctatttgacctttatgctgatcctccatgagttcatatgctaattgttaatgctattggacaggatggagtggttctacccacaacacagatatctttacggtttggtggagaggtgagcattcagtaaaactatggattttagtttgcggaatgaaaaagttgagaagctcaattttttttatgctttgcttatagcaggggttattttcatttttatttcttggagcttttttaaatagggtgagacatataataaactgggaacttctttaatcggatgtttcaattgaatagttttgcagtcaataggctgcttatgccttagatctattgctcgtgaatccaaactgatttcacctttgtaatatccccaagtctatattcgataactttattccaaagatctatcatatgatgcaaagttcaatatatgataattagcacaaacttaactatcccttgttcttataataccggaacaaacttttcttctccttttctttataatttataaataatgcaaagttctaggatttttttggaaaaacataggttttctttgtcttcaagtgttgatacataatataattaaataattaaaaatgtactctcactaatggcttaagcttttagatgagatgattacacacttcagcatcaagcttgaagcagtttattaagttctcggcttctcctgtagtcttccctcaatgattttttaattgtctttcgtctttcttagccaacctgtctgtttttttaaaaaattctaacaggatatatcaagatgccttctctggactcagaggcatcatcaaacatggccacctattcggactgatgccctgtcgaagcctgtagatttgctgatgcttaacagacttaaggagtcctactgtcagatcaaagtaagtttcctaatattcaggaaaatacaaatttaaggtttttaactttatatgctagaaacacgtatagcccattactggatattcctcggtttggttatcaatatatgaacctgggaatgtatatccaaagtgtccttggtatgaatggagacaattagtggatgatgttcagtttaattgttcgatttatcaccttctattgtaatctaccacactgtttatattaactctagttatataggatgcatccttacatgaatacctaaatgcatgtttaatttattccactgtccaggagggggaagtagaagctgttgctatggtacattcatatgaagatggaatgcaacctggatctcataagactaggctgactgctcttaatgtatacctcttaacctcaaaatcttcttgtatttattttgctttttttgaagaggacgtgtgattaatgccatttgtttaactttcacattctaactcttcgaagataaattctgcttatgcctcgtaactttctggggcaacattttcaatgcaatatatgacaaggttactgctttacaagggagacaacttgaattgtctaatccagaaaagttattctttgatcatgattcaatgaaaatccaaaattaaattatgacatgcttttgcaattgaagctgagatatcatgtgagcaattgcgacatgatttgttgaacatgagattccatgttaacagttggacaaaaaaatttacagtatcaagttccatctgtatttcaaaagaaagaggcagatttggtacttgctgataaagatgaaaccttgaattcacaagggttgatattagtgcctgatagtttgataatacaggttcccccaatgggtttattttacccaatgcttttggttccagatgtctatcctccgccacctcgctcttggtaagtcaagtatatatgatttcactaaatcctttctcctccttctgtgctcagttattgcatctaaataggtttaacgattatgatgatatgcttgaggacacatggcacatggacttccctggtggtggtgcatatccgatgtgggagagctacccagttttccaaacaaagccaaagaaagaagatattattggacttgctgaagctattacaaagagcattcttttgacaggtgataatagtaatgtattctataatgtggtagaatttggatactctttctgagccttgtttcatacaattgacagggcgtattgagctacagagaaagttgttttgcagcatgcaactggttagttgtttgaggcattaaacctatagttattgtcatgtggtttgaagcgtgatatttttcaactcttcagattggtggagctgcatcgatttatggtctcattcctgctgtggaggaaaggtttgttttgagtctagttttgccggaatttaaacagaaaaagaaaacaatggccctgttgctaaaagaagttggacataattatatatacatatcatcaatgaatattccaccctctgtttagaaattttttaaagcataactaggtgactgcatttggcatgttatcaggtaagtgctgataagtagaatgttcaaaattttccaagctatagaaatggtttaggagatcaccagtagtctagtatgctttgatgttttttgtttctaacaaaatagtatgcttttatctaactgctcactttcgtatccagagttttacatgcaatcccttcacatgaagcaattgacactgtggaggtaagttttgagcttttgatttctttctattctagttgttatgtcattcttcaatatacatgtgcagacaatctcgtgtaccttatatcttctctttgccagatgcataatctggcgcttgatttaatcaaataaatttatatcagtcctgcccccattatcatcctaaggtttctatgtgtttggccttctcaaatatatccttcagatgcttagattgttttcagcatgctgaagaccataaatggggaaaacaaattgaaaagggaaaggagaacccaaaaataaatatatgagagttcctttgttccttaggaagatacacgtcttttgctctcgcttgttgatgagtacaaattagttgataagcatcacatactaatgatgccttttaagttttaaagtttattttataaataagtaattgtgtgttggagagggcaatatcggttaaagtagattcttcttttgttccatcaaaaccccttcacaaactgtacaagcttcttccaaagtatacggctttctggatgtagatgttgatatcaagtaccgaaacagataataagcagttgatatgtttggtgaagaatattgataatgacttttatcatataaaatgacttaaatgcttttgaagtagttcacactaaaaaggagttccattattttggcaccttgaaaaaaaggagctgattattgcaagattcttaattctaattgattcaactacaaattaacttatgtatcaattactctagattggtttgataggattatttttaataaatgtaaattattttgtgataaatgcaatagacctaagcacaaaagagagaagaacaaatggtgaaaatggaatgaagagggtgttaggcgttttctatgaaaggggtatttggaagtttaaaaggtattagggatgttgtcacgatagagcaatctatttaagatttgtgtatggaatgaatggataaagacaaattcttaagtgttcttttgttctgtttcggattcatgtaggacaccaacttgcacaaatatgaagcgtagtgattgttgttgttgccattttttccctgtatgtagattccttccccaactaatccaacttgttgaaatacatatgtaaaatggaccatgtgtgggtaaatatttggaatggactttgaaaaatctttggctcaaataggtgcaatagaaactattgtgattgggtacccatccttttttgcagcccttactgtccttgcagacttacatcatttcgttttcttctcatcttttattctgtttttatttagtaagttgctgtatttacatttacgtttgtatgtacatatcttaggtcttgcaatcgagaacaaatccagcatttgtgtcatggaaaggcggagcagtaagtagacactatttttattagacgttctgcttagtttccgtcacactattttttaacggctatatcctacattctggtggtaatatggctttgatacaatttagggctttgtattataagtaattctaaggaggtggtaaataatcaggcaaggtagctctcacaccacaattataaaaggaataaaaggagttgataaataataactatctattatagcattagctgaagtgtgtttctgtcactaatgaaataaatggcactgacgagtctgaacagcgtaatggggctgctaatcgcatcaactgacctgtaagactccactacagtgcttaatgaacagttgatgctacagagtattgttgcactgaacctattttggtgcataatttatgaataacatctcaattaaagatcaggagccttaagagggacaatcattgtattgtgtcgtgctttttgtttaataatcttagtttttgtagaatcctaagtggtacacttttacagttggtagaattcttctattcgaatatccaccagctcaatttgagattgctatatccaggatgctaaatgtacttatcttgttgagacaatattcttttaatgatgcataaggtgatacctgttcaaccatatcttgtaccatgcttcacttttaagtttgtatgagactctatagagttagtatcacttctatgcactgcagatcctcggaattcttgatattagtagggaggcctggattcatcgtgaggactggattaaaaatggaattcacattggcagtgggagaaagtacaaggattcatgttatcttcaagctcaggcaatgtgctacctgaattcataagaggtacaaataaatgttgctctaatttatctatattcattttcaactcaggttttatacgtttgattttatttttgcttcagataagtgggaagggtaagggatgagttgggggattaatctaactgacgagggaattgaacggttacgattattatctttccttttcgtcctgtcaagacataattctcgtccttgcgttctgatttcttgttattgttatagtgctggtccataggtcgtgcaacactattgctattaacatttctctttcaactcctttgttgttcagctttctgcagggttatgagatttgataaagatcgaaactggagcttgctagcttatcttgaagacgaaagaactgtaagcctccctcctctctctggactcatatggtagcctttgtgaacaacgattcgataatcctgaaacctgaaaaattattcaagaattatcactgagcaaggccaatctggagtacatcctaatttctaggaaacttaagtcacagtatagagttatactaatcttggtattcaaacttatttaagacgatttcattctcaagattgtggaattttcatagggttgatttgctagctgaccctctatgtgaataattaacttgggagtaatttaattagtcaaataaatatgataatcgtgttatattcaaaaatattaaaccatgcaggaaaagccaagtagtcatcaaaattcggcgcattagtcaaaagctaaacaattcgatgaccttttcgttggattaatttaaatatgacttggtataaccattctcactgaaatggtcggaagcttgttaactttttcatatacaatatattactattattttttgtttcacactgatcatattcgtgagaatagctagtgaatatttatatttttccggggaaattttagagggaaaatagcgattcttttcaatagtgtagatactcatcaaagcttcctattatttccgtaggaagatgctattattttcctctctcattcaattaaaatatcgataggaataactattaaacattttttagtagtaaatttcaatggaaaactagtgacttttaaatagtgaaagtggtatgtgagggttaaaatggtcatttgagaaacgattactaatttctatttcatgtactacacacttctctaatacttttgataatttcttcattacttaaaaaaaattatggattaatgttttcaaaacattagttggtgcaccaaaaacaaaatggtaacaaattaatcaagaatcaataaaattctacttctctttaatttaattattatggaagacagcttgtcaattatagattaaattgtgatattttatttagtaaagtgttaaagactctgttgttatgtgattaagaggttatggattcaaatcacgaaacaacttgcagtaaaaattaggatagattacgtaagcttgtccattgaagattaaattgtgatatttcatttagtagagtgttaaggaagctcttgagtcactggttaagttattgttatgtgattagaaggttatgaattcaaatgaaacaacttccattagaaattagagtaagattatgtgcaataaattcttaagttcgttctttttttttttgccctatttggttgattaatttgaattgcttattacataaattaagaaaggaaaaagataaaagtagaagaaaatatgctataaagattaaagggtgtggataaattattttagtatagtcaaaaatgttcttcaatatcttgtaaagttataaaaactagtgttaggggttaattgattcctacttttgtctatgcttttggattgggtctttgcttgagtccattcatttctgtatattcttttttcttttctttttttttgtgtcaaaggtggtttaaatatgacccaccatggacactttgactagggcacataaagaatatttagaaattatgtttgttcttaactgatgtactaattaagtgatctttttgttcctagataaggttgaatatcttcgagattaaatttatattttgtttgattaaagatttcttatcgaaaacagtgataccctgctaa

SEQ ID NO: 95 - DNA, 3736 bp, Solanum tuberosum
  source 1..3736: mol_type = genomic DNA
gtcatgaggtccactcacttgctgatataatgataaccaacgaacgaacaaattcctcaacagaaattggaatttgagcctcattttaagctcaattttcatttgttcttgacatacattttccccctttcgataaaacaagaaacaaaggaggaacagatactattttgtgaaaatttcattaaaggtacaatcgttactattgaatcttgatttttttttcatgcacaatacatgtttgtggatattcctcaataaagattgattctttggtgaaagaagtttgtgggtgtcatttcttttggattgatcttttgatttggtggtgtatgtgagttgaagatctttcttattgtcaatcaatgtttgtggatgtttttttttatttttaaataaagattgatactttggtgaatgaattttgtgggtgtcatttctttgatcttttgatttggtagagtatgtgattttaaaatctttcttattgtcaatcaatgtttgtgaatgtttgataatttggagaaagaattttgtggttttcgaacctatgttgctcggactctttaaaaatgtcgaaggttgtgttagatcctccaaaactagtgtagtttcggaggatccaacattgatggaacaacatttttgcagagtccaacattttcctctcattggattgatcatttgatttggtagtgtatgtgattttataatctttcttattcttaatcaatttttgtggttatttgctaataaagactgataatttggaaaattaattgtggtttatggacccatgttgctcggattcttcaaaaatgttgaagtgtgtatgtcgaatcctccaaaagtagtgtatttttggaggatccaacacgagtgcggcaacatttttggagagtactagcaccattttcctctttttggattgatcattgatttggtaatgtatgtgattttaagatctctctctctcaataatggtggtgaatatctcttaataaagattgataatttcgagaaagaattttatggtttcctcctacgttgctcggactcttcaaaaatgttgaagggtgtgtgtcggatcctccaaaagtagtgtatttttggaggatccaacagaggtacgacaacatttctggagagtccaagcacctttttccttttctttggattgatcatcgatttggttagtgtatgtggtgattttcatcctttttgtttgttgatttattttgctgaaaatggataatagttttactgttgaaggtggattcttggatctgaaaatgggtatcttccatttgagattttgagtgaaatgtcaaaagctagaaatcattttatttaattgctttctggtctgttttttctgttcccattcttttggtagatctattttctttcaatctgttctttcaaagatatactattgattaagcatgcacctcaattggcatttctgttatatttatttttcaaatgaatttttttgacataaatatgatttaatccaatcatatttatatcctatgatttcatccaatcaaattgcatgagatctttatatgttgcagaaccatttttctgttggagataaatgaaagagcttagctctatttgttgctattgttctgtggattaggattttctcacttattgtggtgtttgatcttatctatgtacgttttggttttagtaacacgaatatatcgtctatctaattccagaacacataaaagatggcagaaggtgaggatattcagcctcttgtctgtgacaatggaacaggaatggttaaggtaactatgatatttcactggattctcctgaacttttggtctcattaaagacggcattggccttatttgatctgaaatactgactgtaaatcttgtcttgaacttgttaggctggatttgctggagatgatgctccaagggctgtcttccctagcattgtgggacgtcctcgtcacactggtgtgatggttggcatgggccagaaagatgcctatgttggtgatgaggctcaatccaaaaggggtattttgactttgaagtatccgattgaacacggtattgttagcaattgggatgacatggagaagatttggcatcataccttttacaatgaacttcgtgtggctccagaggagcacccagttctcctcacagaagctcctcttaacccaaaagccaatcgagagaagatgactcagatcatgtttgaaaccttcaacacccctgccatgtatgttgccattcaggctgttctttccctctatgccagtggacgtacaactggtaagctctgccttcgctcaaccacttacaaatatttttgtcaaatgctcgaaaccagcatttccactgaagtataagattgattattggttgaaacattgtgttgagtcctgtttattaggtagagaacagaattaatgaaaacgaattattaagttagttgtgttcttcaacttaaaatcacgcgcgtctgactgtggagtgtgcattttgatgctaggaattgtgctggactctggagatggtgtcagccacacagtgcccatctacgaaggttatgccctcccacacgccatcctgcgtcttgatcttgcagggcgtgatctcacagatcacctcatgaagatcctcacagaacgaggctactctttcaccaccacagccgagcgggaaatcgttagggatgtgaaggagaagttgtcttacatcgctcttgactatgaacaagaaattgaaacagcaaagaccagctcatctgttgagaagagctatgagcttcctgatggacaggttatcaccattggtgctgagcgattccgttgtccagaagtgctgttccaaccatcaatgatcggaatggaagctgctggtattcatgaaaccacatacaattccatcatgaagtgtgacgttgatatcaggaaggatctgtatggaaacatcgtcctcagtggtggtaccacaatgttccctggtattgctgataggatgagcaaggaaattactgcattagctcctagtagcatgaagatcaaggttgtcgccccacctgagaggaagtacagtgtctggatcggaggatctatattggcctccctcagcacattccagcaggtacataaaatctatctactttttgtggtctgattcatttcaaagttgcacatcttaaagcttattcactatcttcataagcagtagattactttagcatgtttgagaaatccgaattatctgagagcaaatgctgaccagtacttcctatgctaaatgctgagctctttcaaaggaatgtgatgaacaattgtcaaggacgcgtaagatatttacttacgagatttctttttttatgatacagatgtggatagctaaggcagagtacgatgaatctggaccttcaatcgttcacaggaaatgcttctaaatacagcacgtcgagtaagagataactgaagaaatatacaaacttgcatttccagagcagctccccgtcgattggttgcatataatatgcttctcatttgtatttccttttgatttatttttgtttcaatctcaaatatttggtcattggtatgataaaaaaagaaaagaaaaagcaagcagttcatgttaaagtcaatttaccattcatatttttatgtagaagagttgtatttcaaaaatgttgtgatttggattatggataaaaagctttgttgattcatttt

SEQ ID NO: 96 - DNA, 2323 bp, Solanum tuberosum
  source 1..2323: mol_type = genomic DNA
tttgtatttgcactcacaacccaactgtgggcaccaacagcttattcccctcccccaaaaggtaatttcgttgttcggagaagaatttaaaatttaaaatcgatatatgtgtatgagaataattcaaattcgtgtctattgatcgtttggttatagggataggatgctatatcattattaaatttaggattaaatttgtttagtgtttcgtaatggatattagctaactcatgagattatttatcgcatattatatgagatgagattatttttctcgttgtaatctctagattataatatttggataacattgtcgatggtagcttatactatttatacatagttaaaattattgtttatttatacggtagatgtcaaaactcgaacccccttcggctagttagggtattcagctcttcagattttggacccccttagtaactagctccgccaatgtaattaggggtattatatattgagtgttgattataaatactcatattatattattatcgctaggcaaaatcctttatttgttatagcgaattgattatgacatttgaatttgcttcttgaatgttgatattaatggcttatgggaaggatattgaaacttgttgtgtatttgttaatgggtggaaagggtacaaatgtggtaacactctttgtaaatgtcgacattggatcgaatgctaaaagttactttgaattttgatcatgggatgcagtacataaaaaatggcagatggtgaggatattcagccactggtctgtgataatggaacaggaatggtgaaggtaggtatttgaaatttgaaatttgaaatttgaaatttgaaatttgaaatttgaaatttgaaatttgaaatttgaaatttgaaatttgaaatttgaaatttgaaatttgaaatttgaaatttgaaatttgaaatttgaaatttgaaatttgaaatttgaaatttgaaatttgaaatttgaaatttgaaatttgaaatttgaaatttgaaatttgaaatttgaaatttgaaatttgaaatttgaaatttgaaatttgaaatttgaaatttgaaatttgaaatttgaaatttgaaatttgaaatttgaaatttgaaatttgaaatttgaaatttgaaattctcaattctcaatgtgaaatttgtgtaggctggatttgctggagacgatgctccacgagcagtgtttccgagcattgttggtcggccacgacacacaggtgtgatggttggtatggggcaaaaagatgcatatgttggtgatgaagctcaatcgaaacgtggtattctatcattgaaatatccaattgagcatggtattgtgagcaattgggatgacatggagaaaatctggcatcatacattttacaatgaacttcgtgttgctccagaggaacaccctgttctactcaccgaagcacctctcaatcctaaggctaatcgtgagaagatgactcaaatcatgtttgagacatttaacactcctgctatgtatgtcgccattcaagctgttctctctctttatgctagtggtcgtacaactggtattgtcatggactctggtgatggtgttagtcacactgtcccaatctatgagggatatgctctcccacatgctatccttcgtctcaatttagcaggacgtgacctaactgatcacctaatgaagatcttgacagagcgcggttactcattcaccaccactgctgaacgagaaatcgtcagggatgttaaggaaaagctctcctacattgctcttgactatgaacaagagatcatagacaccacttcctcctcaaaaactgttgagaagacctatgagttgcctgatggtcaagtcatcactattggtgctgaacgtttccgatgccctgaagtgcttttccaaccttcaattatcggaatggaagctgctggaatccatgaaacaacctacaactccatcatgaagtgtgacgtcgatatcaggaaggatctttatggaaacattgtacttagtggcggaaccactatgtttcctggaattgctgatagaatgagcaaagaaatcacagcattggctccaagtagcatgaaaattaaggtcgttgcaccaccagaaaggaagtatagtgtttggattggaggttcaatcttggcttctttaagtaccttccaacagatgtggattgcaaaggcagaatatgatgaatctggtccatccattgtgcatagaaaatgcttctaattgtaatttctatctcctcctgtaataaatcatcccatgtaaattttctaaatctatgtccacacataaccatgtgtacaag

SEQ ID NO: 97 - DNA, 2623 bp, Solanum tuberosum
  source 1..2623: mol_type = genomic DNA
tatgaggccggattagtcaaaggaaaactagaggataggcaagatcatagacagtaaaaaatgcggttaatttccaccattaattttgcaaatataaccaatttctgctttaaaagtttcagttttagctccctattcttccttagttttttcccttttttcttcttctctatattggaattctagcctactattccaggacctcccccacccaaaaatatttaaagtaattatctcttttcctatgaattttcatctcattgtctttatgttgtaattgttcagtttctaactttgaggatttcaattttggtgataggtatttcataaaaaatggcagatggtgaggatatccagccacttgtctgtgataatgggactggaatggttaaggtacgatatacttgaacacatttttaaattttcgaaacatttattaaaattcaattctaataagtaattcgaatgaatagactagctcagagtactaaactttcgttatatacataatcgagagaagcactagatcattttcactttacacgtacggtatctccggaacgacacctatttattttttggccatcttaacaaaaatgtgttgctgaaatttctacatgacaaatttttgatgacttgcctgaattaataggatttgggggacaatttctagcgatggtcatgatttatgacaagacaacctgacgaattttatggcaatctgctaaaatcaccaaagtttggttgccaatttttggtgttcgatcactgtttgtgataacactatctaacgaatttaatagcgattcaccaaaacaatttctggagattatttttttgccacaaatctacttatgtaaattgagtgaccatatcatgagatattatctctggaatgaaagaacctatttgtgcaaattaccttcgattttattgtatgctaccttattttgtatttctttgagacactaatactacgacttaaactcgtgatcttttgatcacacagtgacaactcttaccattgcgccaatgctccccatcaatagataaaatgtcatagatttgccaattatatatatgttccccttttgatttgtgtaattgtcaattataggcgggatttgctggagatgatgctccaagagcagtatttcctagcattgttggtcgccctcgtcatacaggagtaatggtaggaatggggcaaaaagatgcatatgttggagatgaagctcaatccaaacgtggtattctcacattgaaatacccaattgagcacggtattgttagcaattgggatgatatggagaaaatttggcatcatacgttttacaacgagcttcgtgtggcaccagaggaacaccctgtactgctcacagaagcacctcttaacccgaaggcaaatcgtgagaaaatgactcaaatcatgttcgagacattcaatactcctgctatgtatgttgccattcaagctgttctatccctttatgccagtggtcgtacaacaggtgaacaatttctcgtatttttgttactctgtatctgagaaattttatccatgtaaaatgttatgtagaacgtaagaacattgaatatcgaatgtaggtattgtgatggattctggtgatggcgtcagtcacactgtcccaatctatgagggatatgctttaccacatgctattttacgtcttgatttggctggtcgtgaccttactgatcacttaatgaaaatcttgacggagcgtggttactcatttaccactacagcagaaagggaaattgtgagggatgttaaggaaaaactctcatacattgctcttgattatgagcaagaattggatacatcaaagactagttcttctgttgagaagagttatgagttgcctgatggtcaggttattacaattggtgctgagcgtttccgatgcccagaagtactattccagccttcaatgattggaatggaagctgctggaattcatgaaacgacgtataattcaatcatgaagtgtgatgtggatattaggaaggatctctatggaaacatcgtacttagtggtggtacgactatgttcaatggaattgctgatagaatgagcaaggaaattactgcattggctccaagcagcatgaaaattaaggttgttgctccacctgaaaggaagtatagtgtttggattggaggctctattttagcttctctaagtaccttccaacaggttagtaacaacttcgaaatttacacaattcagttacgttcattgtcattagttcatatagtttgtttgcttgtgtttaagatctgatttagcaagtttcatcactgatttagtcgtaagttatagagaagtttgactgtgtgtcattttattttatttcactttgaaatgcagatgtggatcgcaaaggcagagtacgatgaatctggtccttccatcgtccacaggaaatgcttctaattgtttagacatgtaactataagttactttgttgttataataacctaaggcaaataatttttccagaatatatagatttccatattgtgaagctttgccgtttaattgtaactcgaaacacttctgattatatctgtatataacatgcagaaatatagata

SEQ ID NO: 98 - DNA, 3736 bp, Solanum tuberosum; identical to SEQ ID NO: 95
  source 1..3736: mol_type = genomic DNA

SEQ ID NO: 99 - DNA, 2839 bp, Solanum tuberosum
  source 1..2839: mol_type = genomic DNA
ctccaattccaaatctcccaaaggtacatttctttttttgttatatttcatgattcaatctattaatttgtttgtgttgtgaaattggatttaagattttgagtttacgagttctggtaaatgatttatatgtatgaatatgttgttggtgggaggtgataggtattcgtggagtaatctaggtggcatacacatcataattataaaagaaaatgtataggtaggtgcacatgtttcaaatcggattatgtagacgcagtcttaccttgcatttctacgatatgttgttttccacaatatgaatctgtgacagcaaaatccgaaaacttttttcatgtgtttgatttgcatctgatttatgtgaatcatgagttgtgtaagtagctagatcgatgaatatgaataaattgtaatttgatgaatataactacttatgtttaattgatttgttgctagtaacttttaggggattttgatatttgataatttgttctaggtcaattgctatttagaaatgttgattataggttaagaaatggacattaattagtctaactcaaccgcaaaatctagttcatgagatgaggattgtacgatcatatttggagatcaatgtgggaattttaacaccctgcacacccgagcctgtcaattatagcgtagacaacatcatcagataaaccaaacactaggatgagcctgacgttgatgccatgttaagaaatggagtttggacctaattcaacctcgaaagttaattcatgaggcatagattgcctaaagctatataaggagaccaatttcccatcctacaatcgatgtggaacttctaacgttatgtctttgaagctgtgtatttttactaaagattcagttttcgatgtaggaagtaacataagatggcagaaggcgaggatattcaaccactcgtttgtgacaatggaacaggaatggtcaaggtaagctgaaaattgtatatatagaacagagttaatgctgcaggatgtttctctgactcttgaggatgtttgttgtatctgtttcggatcctccaagaatgcactacttttggaggatccgatatgctgcacctgtccacatttttgaagagtctggggaacatagatttgatgatagttataaagttaagtagagtctgatgatgtttcaatatctaggctgggtttgcgggagatgatgctccacgagctgtattccctagtattgttggtcgtccgcgtcatactggtgtgatggttggtatgggtcaaaaagatgcttatgtaggagatgaagctcaatcaaagcgaggtatcttaacgttgaagtacccgattgagcatggtattgtcagcaattgggatgatatggagaagatatggcatcatactttctataacgagcttcgtgttgcaccagaggagcatcctgtcctcctaactgaagcacctcttaatccgaaagctaatcgtgaaaaaatgacacagattatgtttgagacttttaatactccagctatgtatgttgctatacaagctgttctttcgctgtatgccagtggtcgtaccaccggtaagcaaatcttcattcatttatgtctgatgcatggtgaatagcctcgagggaggggaggggaggggtaaggtatgtgtacactctactctactctgccctatggcgctaattcattaaggtttatacaggtattgtgttggactctggtgatggtgtcagccacactgtcccaatttatgagggatatgccctcccacatgccattcttcgtctcgacttggcaggtcgtgacctcactgatcatttgatgaagatcctcactgagcgtggttactcattcaccaccacagctgagagagaaatcgtcagggacgtgaaagaaaaactctcttacatagccttagactttgaacaagaactcgagacttcaaagaccagctcttctgttgagaagagctatgagcttcccgatggtcaagtcattaccatcggtgctgaacgattccgttgccctgaggtcctattccaaccttcactgataggaatggaagcagctggaatccacgagaccacatacaactcgatcatgaagtgtgacgttgatatcagaaaggacctctacggtaacattgttcttagtggtggtactaccatgttccccggtattgccgatagaatgagcaaagaacttactgcattggctccaagcagcatgaagattaaggttgttgcaccaccagaaaggaaatatagtgtctggattggaggttctattttggcttccctcagcaccttccagcaggtttgcatctatctttgtttcatattccatccgttcacttttactcgtcatgtttcccttcacgagagtcagtttgactaatttccaaacctaaactgaattagatcacttcaatactataagttggtcaaagtccatacaatttgactctcgagtatgacaagtaaaaatgaacagaacgagtactatgataacatggtttagtgaggattcatatcaggtcgactccgacttatttagctctgcctctagttgtaaggttcatacagtttctgatggagttttctattttgtctgcagatgtggattgcaaaggcggagtacgatgaatcaggtccgtccatcgtccacagaaaatgcttctgattttccaaaaacaacaacattgatgaaaggaatgcagcttgtgatattgtattctgtgtttgtttttctgtatttttgttaatgttctcattttctattgaaaaccttcagagggcaaagagttttggttgtttgatgatcttaattcatttatat

SEQ ID NO: 100 - DNA, 3653 bp, Solanum tuberosum
  source 1..3653: mol_type = genomic DNA
aagagagcttttccacattttgcattcctcgactgtttgcttgtgtgtgcctctctctctctctcctcatctctctaccaattttctctccgaaaaaaggtacgattcatctgcattttactacaatttcaatcgatttttctcgcatttttttgatattgtggtgtaattgatcgatttttgtagtaattattgtgttttcgatccgtagatctgttcatcggtattttactacaatttcaattgcttattctcgcatttttatgataattatgtttgatattgaggtgtaattgatcgatttttgtagtaattattatgatttcgatccatagatctattcatcggaatattcaggtgttaattgttagttgatttgtggaaaatagtatcagaattgaatgagctagcatatttatggattttgcagatatggcatagatattgttatccatggaaactgaattgtttttcttcctcttttttttttatatatattgaggttgattgatcgatttttgtagtaattattatgttttcgatccattaattggaatattcaggtgttggttgttagctgatatatggaaaatagtatcaaaattgaatgagctagcacatttactagattttgcatatatgacatagatattgttatccatgaatgcataattgtttttttttttcctttttttctctttacacggttctcttagattcctagttccgagaaaaagttattcatctgcattttacaatttcaatcacacaatcgctttttctcgtttttttgataattatgtatatgatattgaggtgtaattgatccatttttgtagtaattatgtttttgatccgtagatctgttcatcagaatgttcagttattgattatatggaaaatagtatcaaaattgaatgagcttagcacatttctagatttagcagatatggcatagatacaacttacaagtatccatgaaaacagggtttttcttcctttttttattaggattttgttggatctgctgagtactttttgagagtttatgtattattgaattaatgtgatggatctttgcgtgttaactgataatgtcgtagagttctggaattgcttggcagaacagcagaagcaaatctaatagtgatatttgttttgatttgatatgatgatcctagggaaatagaacattgcagatgcctttggtggttatcccgattattctaatgattgtaatgcactggatttggggaaatatggaatctgaatcatgtggtttatttgagtctcattgttgctttttgtgtgaaatagaagctattgagttttgtgggtaaattttatgaaacttgaagtgcattatgtattatggattgtgtgcagttataaggcttgcaaaaagctgtacacctgtacctattcaacctaataaatgtaaaatccaccaaaaactggtggtgattttatcatttatccattatccatggaaaaccaactttgttagtgtatctcgtgagctggtttaatatgtccaaaatctctgatgttgtgaaacatatttctacttatttgttgatgcactgatttatcattagctaaagtaatatctataattgttaacatactattattcaatttatgtgcggagcctttactttgtcatccgtgcaaagagagaatatatttccctgaaaactgaaaaaatagaggttcgaagtaatagtaacctttgactgaaggaatagtatatgaacatctctttcccataaggtgcattcttttatgtgggactttatgtgttcagcttatttaaacttgtttgttatttacaaatagcgaaaacttgtataaggaatcaagatatcagtatcagatggtaattttttggacatatacatttcttactgaggtttcgtttttcaatgcaggaaatagcataagatggcagacggagaggatattcagccccttgtctgtgacaatggaactggaatggtcaaggtaagctcaagtgttttgtactacagcagagttggcctgccattttttactgatgcttattaccttgttgcccattctgtttacaaaattaagagattcttatattggtttattatctaggctgggtttgctggagatgatgctccacgagctgtatttcctagtattgttggccgtccccgccatactggtgtgatggtgggtatgggtcaaaaagacgcctatgtgggagatgaagctcaatcgaagagaggtattttaactcttaaatacccaattgagcacggaattgtcagcaattgggatgatatggagaagatatggcatcatactttctacaatgagcttcgtgttgcccctgaggagcatcctgtcctcctaactgaagcccctcttaaccccaaggctaatcgtgaaaagatgacccagattatgtttgagactttcaataccccagctatgtatgttgctattcaggctgtactctcactgtatgccagtggtcgtaccaccggtaagaaaattttcattctttattagcataattattttatattactgacatctctcaagtttcttgatgcttctaccatgtaaaaatcttgcacttatatgatgctttgtggatatgattacttataagttgtaaccttctaattttgacatggttgttatcaattgagttattacttctaattctttttcttctccgcaggtattgtgttggactctggtgatggtgtcagccacactgtcccaatttatgaagggtatgcccttccacatgccattctccgtcttgacttggcaggtcgtgacctcactgatagtttgatgaagatcctcaccgagcgtggttactcgttcaccacctcagctgagcgagaaattgtcagggacgtgaaagaaaagctcgcttacatatctcttgactatgaacaggaacttgagacttcaaagaccagctcttctgttgagaagagctatgagctcccagatgggcaggtgatcaccattggtgctgagcgtttccggtgtcctgaggtccttttccaaccttcaatgattggaatggaagctgcaggaatccacgagactacatacaactctatcatgaaatgtgatgtggatattagaaaagatctttatggaaacattgtgctcagtggtggtactaccatgttccctggtattgctgatagaatgagcaaagaaattactgcattggctcctagcagcatgaagattaaggtggtcgctccaccagagaggaaatacagtgtctggattggaggctctatcttggcttccctcagcaccttccagcaggtctgcgtcgccccttccccttccccctccctcctaataattataagtttgctttttttcggtgtctatcgtacttcgaagcttgacagttactgacggtgttttctgcttctcttattttctgtagatgtggattgcgaaggcagagtatgacgaatctggtccttctattgtccacaggaagtgcttctaatttttccaagattgacaatgttggtgaaaggaaaatacttcttatttcctactggatcagaaatgcaattgcagtgttatattctagctttattttctgtatttttgttctcatgctggattgaaga

SEQ ID NO: 101 - DNA, 3135 bp, Solanum tuberosum
  source 1..3135: mol_type = genomic DNA
cttaagattcctcattttgtatttcttcatttccccaaacagagtcttcgaagccgccggccataatctccggttgctttgcaaaatctccggcgaccactttccgatctcctctcagttcccggtaagtctagatctggtctttcttatcctctttttttttttttttttttttttnnnnnnnnnnnnnnnnnnnnnnnnnnnnnnnnnnnnnnnnnnnnnnnnnnnnnnnnnnnnnnnnnnnnnnnnnnnnnnnnnnnnnnnnnnnnnnnnnnnnnnnnnnnnnnnnnnnnnnnnnnnnnnnnnnnnnnnnnnnnnnnnnnnnnnnnnnnnnnnttttttttatcctttttttttttttttttttttttttagaatttttgatggattgagttatgtgaaatgtcaaagaaaattgtgagatgcatgtggggtttatgttttgagatctatgaaagtggtaaaagagatagaatttgtttatgtgaaatgggtattttttatttcttggattgactagttagatgtagtgaatcttgggtatttgaaggttgagctaatataattctggatctgatgaagtggatctattttgaggttgatctgctatggatttaccttgatctactgtttgattatagttcaaaatggttttgaatggtgttctgtagctctcttgtggtgattgatgaataaatcttgttaagtaaaagaagaaaaaagctttctttttgttggaactgaaattgattatgtccttttggctttctgattactttatatatcaatgagatgtagcttagttgaaaatgagtgtggagtgattgaggggttttgcttttatgattttttgtctccgattggatttgaggagaagctaagttatagagcgagacgtatgcgagtagtgtcatttggatttgctggattgataaatgaagcatagagttttaagatattttcactttggatttccctcttatctatattgggatgttaattgagaagtatgcaatgtattgtcattttgatatgattgatcgataggttaaacatccgaggtttaagatacatctatattgggatattatcttattctgtaattcctacatctacttatcttgctgactacggtatctggatttaagattgcttattaatctgttgtttgtattggcagttgaatagaaaatggctgacggtgaggatattcagccccttgtttgtgacaatggaactggaatggtgaaggtcagttcttaatttttttacttttatgattttcaatgacggagtcgtgatagttgaacacttcatttgaagtgtattttgttatattcttgacatgtttctgatttttttggtgaataatttgattgtataaatgtaggctggatttgctggtgacgatgctcctagagcagtgttccctagcattgttggtcgtcctcgtcacactggtgttatggttggaatgggacagaaggatgcatatgttggtgatgaagctcaatccaagaggggtatcttgaccttgaaatacccaattgaacatggtattgtcagcaactgggatgatatggagaagatctggcatcatactttctataatgagcttcgtgttgcccccgaggagcaccctgttctgctcactgaagcacctctcaaccctaaggccaacagagagaaaatgacccagattatgtttgagaccttcaacgttccggctatgtatgttgctattcaggctgtgctttccttgtatgctagtggtcgtacaactggttagtattagtcctctcatgatccaaatcttcccttgttggaaagttgtttttgatctgacattatgagtgtcttttgacaggtattgtgttggactctggtgatggtgtgagtcacactgtccctatctatgagggttatgctttgccacatgccattcttcgtttggatcttgctggtcgtgatttaactgataacctgatgaagatcctcaccgagagaggttacatgttcaccaccactgctgaacgggaaattgtccgtgacatgaaggaaaagcttgcctatgtggctcttgactatgagcaggagattgaaactgccaggagcagctcctccattgaaaagaactatgaattgcctgatggacaagttattaccattggtgctgagaggttccgttgcccagaggtcctcttccagccatccatgattggtatggaagctgcaggtatccacgagactacctacaactctattatgaagtgtgatgttgatatcaggaaggacctctacggtaacattgtgctcagtggtggctcaaccatgttccctggtattgctgatcgtatgagcaaggaaatcactgccttggctcccagcagcatgaagattaaggttgttgctccaccggagagaaagtacagtgtctggattggaggatccatccttgcatcacttagcaccttccagcaggcaagcctttgttttttttttatcttctcttgcatatacttttgccatttaaactgcatattgtaccaagttgttgctaacttaaaacttgttttaatcagatgtggatttcaaagggcgagtacgatgagtctggtccatccattgtccacaggaagtgtttctaaggtgctgctgctatttttacttgtgttcacgagttactttttatgttcttcctgctaaagttattaatgttatcgtccacagtgaactcgggtctgctgctaggcaagtctttgagatggggctatgaaagaagggcaattaaaaacattgtactactgctgatactatttcatgtttccagtgcaaggctcttttgtctggagatatcccttcgtgaatttgaacttgaactcgaactcgaactcttaggttgtttgtagttgcggagagtgattgtgttgttgtttattattttgttggggttttatgtttcattttctttgttttgctatcctatggtacctttttttttaaaaatcttgggaacaaatatgtcgatatttattgaatgagaatttttgtagtattttcagacttttgaaatcagctttgtagtttatgtggatcatgtggggattaaattttctgtggtgaagtgttattttc

SEQ ID NO: 102 - DNA, 2597 bp, Solanum tuberosum
  source 1..2597: mol_type = genomic DNA
tgtctcaagtctcaactcattcatcctcttccagactgtagagagagaaagcaagtcggctacaagtcatcatccgttgccttggcttttcagatccatcttcatttccttttcggtaatctaacctctcttcttcatcagatcttgctttatttacttgcttgtttgctttcaatttctgctttgagatctgctctagttccttatgttgaatcgctgccttttgttctcctgattactctactgctctaattagttagtaaaacttggatttaggtgtgatattccgtttgatttttccagatctgttgttttaatggtcaatctgtcatgaacttgatctgctctcaattttcctagatctactttatttttagtacttgctgttacatagtatctctgcatactcattttggttaccagaaaatttagctgaactttgacggatctattttttttggctgctatacggaaaaacgaagcctatttttatgatgataagtgtccaccgttgtattcatttaaccgagctccaaattgtctgggatttagaatttactaactaacaagtaacaagtaaagcggtatatgactagagacatttagttgagttccgaattaatcttctgatgttgttttatgtgttgataccttcatgtatatatttaggtcttactaagtgtgctgattttactttcagttgattaaaaatggccgacggtgaggatattcagccccttgtttgtgacaatggaactggaatggttaaggtagtccttgttcatagattattgtttttacaggaagcacttgtcatttataacatttcaatttaagcaaactgcatattcttttttatggaatgatttgtgttttgaaatgtaggcaggatttgctggtgatgatgctcctcgagcagtgtttcccagcattgtgggtcgtccccgacacactggtgttatggttggaatgggacagaaggatgcctatgtgggtgatgaagctcaatctaagagaggtatcttgaccttgaaatatcccattgagcatggtatagtcagcaattgggacgatatggagaagatatggcatcatactttttacaatgagcttcgagttgctcctgaggaacaccctgttctcctgactgaggcaccccttaatcccaaggccaacagagagaagatgacccagattatgttcgagacatttaatgttcctgctatgtatgttgctatccaggctgtgctttccctgtatgctagcggtcgtaccactggttcgtactagtctttacatgatccaactttgtctgtccaatgaaataactgtgatttaattttgacttaataaattacttttgacaggtattgtgttggactctggtgatggtgtgagtcacactgtccctatctatgaaggttatgctttaccacatgccattcttcgtttggaccttgctggtcgtgaccttactgatagcttgatgaagatcctcactgagagaggttacatgttcaccactactgctgaacgggaaattgtccgtgatatgaaggaaaagcttgcttatgtggctcttgactacgagcaggaacttgaaaccgctaggagcagttcctccattgaaaagaactatgagttgccagatggacaggttattaccattggtgccgagaggttccgttgcccagaggtactcttccaaccatcgatgatcggaatggaagctgcgggtatccatgagactacctacaactccatcatgaaatgtgatgtagatattaggaaggacctatatggtaacattgttctcagtggtggctccaccatgttccctggtattgctgatcggatgagcaaagaaatcactgctttggctccaagcagcatgaaaattaaggttgttgcaccacctgagagaaagtacagtgtctggattggaggatccattcttgcatccctcagcacattccagcaggtgagcttttgttcttctttgcgttaattttttttccagtacaaattacattagctagttagactgaatatgtgttactttgtgcttgatcagatgtggatctcaaagggcgagtatgatgagtctggtccttccattgtccacagaaagtgcttctaaggtgctgctatatttacttaaaagtgcgagtttcctgtctgttttcccggttttgctattatgtcgccagtcaatttggttttttgctgggatggagaagttaggtggtgggggctatgaatgcagggtaacaaacaacaaattgccagtattatctcatgtttccatttaatgtggttaatgttctctacatacttgtgaggtgcctcatgcattgccctcttctgtctggctacaccatcccttggtcgaagtgtctcttttaggttgtttgtagttgaaggagagtgattgtgatgttttctccttgtcttttctctcattttctccttttatctgattttgctcttttgtggttctttttttttcttggacccaataatgtcaatatttattgaatgagaaaattcctatatcatatcagtttgaggatatcattattattattatttgtgtg

SEQ ID NO: 103 - DNA, 24625 bp, Solanum tuberosum
  source 1..24625: mol_type = genomic DNA
ccttttgcgtgacttttagttggcagccaaaaacatgccacactaattgtatttcattccaccgctttaaatacagaaaaccgctaatatttctttcttcattttcaagaacttctcttacttctccataatcatcaaactggtaaagtttttggggcttttcacaattttctgccaagaattcctttttctctgtttctttgtcctgttttcagcttttataacttgttgatttatttgtttacatgatcacataggctctcaactaacatcaagatctgtaattcaatttgtgataccaagtgttgggtttcttgggtagttcttagttgatcttgatattcaagaaaattaaagattgggttatttttgtttgggcttgaggcagtagctattgattgattaatataattcttgaagcgtaggtcatatgtcttcttctttttaatatagtataatatatatatatatatagtacatgcatgtcctgtctcttacttgcaaatatatggaaagttttgattagtatggttacaagttaaatttgatcacataggcaactaagatctctacttcaattttgtgataccaacttgacagtgggtttttatctccttgttgtttgggttatctttatgaatcaaagttactactttaatttcttgatcccggagaagggtagttcttagttgataatcaagaaaattcaagattgggcttgaggtgtagctattgattgattaatataattcttgaactatgttctcttactattgtgtgtgtcttcttcttttttatacatagtatatgcatagcctgtaaaatctaattattattactttcatcttttctcactatttttcactaattccaacttttgataggttttaaaagatggcagatgcagaagatattcaaccccttgtctgtgataatggaactggaatggtcaaggttagttagtgattaagctctgtagctttcctccttccgattatattttactctatcagaactactcttttggttgtattgactgtaaattagcatagtaatatcttggatttcaagcaaatcttttggtccccattggtttgagctgctaaagctatgcacccttgtaattcaaattttaaattatggttctgatgattgggagtatttgtagtacttcccttgattaatggctcttttgacctattttcacacaggctggatttgctggtgatgatgcaccaagggctgtttttcctagtattgtcggccgacctagacacaccggtgttatggtagggatgggtcaaaaggatgcatatgttggtgatgaagctcagtcaaaaaggggtatcctcaccttaaagtatcccattgagcatggaatagtaagcaactgggatgatatggagaagatttggcatcataccttttacaatgagttgcgtgtttctcctgatgagcaccctgtgctacttactgaagcacccttgaaccccaaggccaatagagagaaaatgacacagataatgtttgagactttcaatgttcctgccatgtacgtcgctattcaggcagtcttgtctctttacgccagtggccgtacaacaggtgcaacttgagtctcaccctccttttaccaccaaagttttgattggtagattgattattcgacagtcagcatccattgtgttattgtttaaagaacttatttaagtattcagacatagagagaagtctggtgatcttgacttctttcgagcttttagttcttatgtatggttctgatttagtttaatatgtttcctctttatggaggagatactgcctgtgattgtttccatataatggttttctttgaatcttcaagttatcctttctaattatgtttttggccatttcaacaggtattgtgctggattctggtgatggtgtcagtcatacagtgccaatttatgaaggctatgcccttcctcatgcaattcttcgattggacctagctgggcgttgttttattttaaaaatatgtaggtaaaaggaaaaatgactgagtttccggaaactcgattaaacttatggtttaagagaaatcgaatttccaaaaggacagagtcgccacttaatttttagtaaaaaaaatcaagaaaaaatataaggtttttcaaaaagattcaaacagataaaatcgattgaaaacaagggttcgagttcaatgtacgttccgagaaggtattaggccctcggaatgcccgctaactcgcggttgaccgacgatttgaccaaaatgattttttgactaattttgaaattttaacttaagtaaaagaatttatttattttaactaattattttttaaaatttaactgagtaaagaactcatgactttgactaatcttgaaaatttaacaaaagtaaaagaactcatttatgactatttttttttattctaactaaataagagaacttacttattttaactaactttgcaattttgactaaataaaaggactcatttatattaactatatatttttttttttgaaatttttaacttagtaaaagaactaatttatattaactatattttttatttatttatttatttttgaaattgacttagtaagaaaactaatttatttcgaaattttaacttagtaagaaaactaatttatttcgaaattttaacttagtaagaaaactaatttatttcgaaattttaacttagtaagaaaactaatttatttcgaaattttaacttagtaagaaaactaatttatttcgaaattttaacttagtaagaaaactaatttatttcgaaattttaacttagtaagaaaactaatttatttcgaaattttaacttagtaagaaaactaatttatttcgaaattttaacttagtaagaaaactaatttatttcgaaattttaacttagtaagaaaactaatttatttcgaaattttaacttagtaagaaaactaatttatttcgaaattttaacttagtaagaaaactaatttatttcgaaattttaacttagtaagaaaactaatttatttcgaaattttaacttagtaagaaaactaatttatttcgaaattttaacttagtaagaaaactaatttatttcgaaattttaacttagtaagaaaactaatttatttcgaaattttaacttagtaagaaaactaatttatttcgaaattttaacttagtaagaaaactaatttatttcgaaattttaacttagtaagaaaactaatttatttcgaaattttaacttagtaagaaaactaatttatttcgaaattttaacttagtaagaaaactaatttatttcgaaattttaacttagtaagaaaactaatttatttcgaaattttaacttagtaagaaaactaatttatttcgaaattttaacttagtaagaaaactaatttatttcgaaattttaacttagtaagaaaactaatttatttcgaaattttaacttagtaagaaaactaatttatttcaacttatttatttattacccttaatattttatcactttatttattttaagggggaatgaactaaaggaaaattttcaaaaaggggaaatgacttaagtgacaagacaaataaaattaaagctaagtataacacaaagatactttaatttatatatataaaaaataatttatttattttttttttttaaaataaaatgaaaatggctatcttgaggaatttagttaaattagaatcataaattaaacaaagttagtcaaacacaatataaataataagggagggaaaggaaataatcaaatttgggcctttcccacatcttggaccttgctgaaattgtccaaggcctttgggcctattttgcttatggaaaaatctgcgtataccctttacgtatatcactgtatatggaccgtgtttgggtccgaatttctgcgttttttccttgaacaatagctattgacttatgtcttatcatcagacttgtatcctcgtattttgcaacctgtaaaccatatttcttgctgtatacgagtgtatatagcaggtatatcacccctttttgggccttttgagacctgcaatcagccattaaactgtacacctgcttccttggcttcacatattaatccattgggactcgattttaaaggtaacatcgaaagaagtgcaaggatggagtccaaagtgaactcgaatcggtgtcacatgcgacaaagtaaagagagaaagaaattaattaatagggtaaaaggaatataacattcgagggtatcaacaagcaatttagtactaccagtaagtaggggaagacacaaatagaaaacttaacttactcttaaaataggatagcaacatatgcaaagaagatatcaattagtctacccactaccaagataggacgaatctatttccatttttatgccgtaaaatactacccattagatgtgatcacgagatggacatcaactgtatatatattcaaaaaaaannnnnnnnnnnnnnnnnnnnnnnnnnnnnnnnnnnnnnnnnnnnnnnnnnnnnnnnnnnnnnnnnnnnnnnnnnnnnnnnnnnnnnnnnnnnnnnnnnnnnnnnnnnnnnnnnnnnnnnnnnnnnnnnnnnnnnnnnnnnnnnnnnnnnnnnnnnnnnnnnnnnnnnnnnnnnnnnnnnnnnnnnnnnnnnnnnnnnnnnnnnnnnnnnnnnnnnnnnnnnnnnnnnnnnnnnnnnnnnnnnnnnnnnnnnnnnnnnnnnnnnnnnnnnnnnnnnnnnnnnnnnnnnnnnnnnnnnnnnnnnnnnnnnnnnnnnnnnnnnnnnnnnnnnnnnnnnnnnnnnnnnnnnnnnnnnnnnnnnnnnnnnnnnnnnnnnnnnnnnnnnnnnnnnnnnnnnnnnnnnnnnnnnnnnnnnnnnnnnnnnnnnnnnnnnnnnnnnnnnnnnnnnnnnnnnnnnnnnnnnnnnnnnnnnnnnnnnnnnnnnnnnnnnnnnnnnnnnnnnnnnnnnnnnnnnnnnnnnnnnnnnnnnnnnnnnnnnnnnnnnnnnnnnnnnnnnnnnnnnnnnnnnnnnnnnnnnnnnnnnnnnnnnnnnnnnnnnnnnnnnnnnnnnnnnnnnnnnnnnnnnnnnnnnnnnnnnnnnnnnnnnnnnnnnnnnnnnnnnnnnnnnnnnnnnnnnnnnnnnnnnnnnnnnnnnnnnnnnnnnnnnnnnnnnnnnnnnnnnnnnnnnnnnnnnnnnnnnnnnnnnnnnnnnnnnnnnnnnnnnnnnnnnnnnnnnnnnnnnnnnnnnnnnnnnnnnnnnnnnnnnnnnnnnnnnnnnnnnnnnnnnnnnnnnnnnnnnnnnnnnnnnnnnnnnnnnnnnnnnnnnnnnnnnnnnnnnnnnnnnnnnnnnnnnnnnnnnnnnnnnnnnnnnnnnnnnnnnnnnnnnnnnnnnnnnnnnnnnnnnnnnnnnnnnnnnnnnnnnnnnnnnnnnnnnnnnnnnnnnnnnnnnnnnnnnnnnnnnnnnnnnnnnnnnnnnnnnnnnnnnnnnnnnnnnnnnnnnnnnnnnnnnnnnnnnnnnnnnnnnnnnnnnnnnnnnnnnnnnnnnnnnnnnnnnnnnnnnnnnnnnnnnnnnnnnnnnnnnnnnnnnnnnnnnnnnnnnnnnnnnnnnnnnnnnnnnnnnnnnnnnnnnnnnnnnnnnnnnnnnnnnnnnnnnnnnnnnnnnnnnnnnnnnnnnnnnnnnnnnnnnnnnnnnnnnnnnnnnnnnnnnnnnnnnnnnnnnnnnnnnnnnnnnnnnnnnnnnnnnnnnnnnnnnnnnnnnnnnnnnnnnnnnnnnnnnnnnnnnnnnnnnnnnnnnnnnnnnnnnnnnnnnnnnnnnnnnnnnnnnnnnnnnnnnnnnnnnnnnnnnnnnnnnnnnnnnnnnnnnnnnnnnnnnnnnnnnnnnnnnnnnnnnnnnnnnnnnnnnnnnnnnnnnnnnnnnnnnnnnnnnnnnnnnnnnnnnnnnnnnnnnnnnnnnnnnnnnnnnnnnnnnnnnnnnnnnnnnnnnnnnnnnnnnnnnnnnnnnnnnnnnnnnnnnnnnnnnnnnnnnnnnnnnnnnnnnnnnnnnnnnnnnnnnnnnnnnnnnnnnnnnnnnnnnnnnnnnnnagctttgggaattatggccgaaccccagaaatgggtttcctacatatctcaggctatatgagaattcaggccacttgtagctcaaaacgcttgatttgacgcacgattttggaagaactcaaaagtcatccgacgttggattatgaagaggccggaacgctcgagaataagatttaagagtgaatgatggaatacagccgagttttcgacattgatcccgcctacatatccctaaccttagggaatcaggctgtctgtagttcgactcaatcggtagaaaagcaaatctattatgtaggataaccttttgttctggaaaagcgacaaagtaagtcaagtatgaaaaagaggcttgcaacctcttagccatgaatgtggagctcttcacatccataagtaagaacttacacggacataattcccaaaactcttagggcattgtcactcagatttgaaagcagtttccggtagagaccaaaaatttccggatgcgaaactgaaaccgacaaacctaaagataaacccacatgccttctaataggggtgtggtttgattgtggtggaagtcgctcctctgctcgtgtcctaagagtttggcattcctctttggactatgtcccagttcgctgctaagaaaaagttccacgttgtgctgcatcctttttgatgtcgtccgcaccgtgttgacacttaatcgctctccttgaacagttgacgtcaactccgtcgggtttgacgcgaagcaaataaagcttgtgtctcatatttgcaatataatcttcaatgcactcttctttttatgtcaaagtaataaaataggctgatgtaatatgttcataattctcttgatgtcgtctttgcaaagaaaaatgatgcagttgatgttaattctcttgtgatgggtaaatctttctcttgcaatgcataacttttctcctgctgtgcatgacttttcttttgctacgcgtaaatctctttcctgcgatgcatgacttcttttccgcgatgcatgggtcttttgctatgcatgaatctctttcccgcaatgcatgactttttcctcgcgatgcatgacctcttttccacgatgcatgaatccttctcttgctatggatgaatctctttcccgcgatgcatgacttctttcctgcgatgcatgacttctttttcgcgatgcatgagtccttttctcgctatgcatgagtccttctcttgctatgcatgaatctctttcccgcgatgcatgacttctttcccgcgatgcatgacttctttttcgcgatgtatgagtccttctcttgcaatgtatgaatcttctcttgcaatgtatgaatcttctcttgccgatgcatgacccttttccccgcaacgcatgacatttttcctacaatgcatgacattcgcgatgcatgaatttctcctccgcgatgcatgactttctttcccgcgatgcatgaattctctctgttgtgcatggcttcctttcccgcgatgcatgaatccctctctgatgatgcctccctaataccgaacgaagataacgcttcataggtgatcttttgggtatctttggatggcggtatcgtctcaatcgacaatataaataaaaatgatcctcagagtagtggtatcatctcatttgacaatacgatataaatgactctctgggtagtgatatcgtcttaatcgacaacataaataaaaatgaccctcggagtagcgatatcatctcttttgacaatacatataaataactctccgagtagtggtatcgtctcttttgacaatacaatataaataatcttcagggtaagaatattatcatatctgataatataatgcagataaatatcttccaggtatctttagttgctggaaaataataatattgccctctttatggtttttgttgtttcatctctgaacataattgcaatgttcgttgtgaactttgcttttgctgagaatttgaataaagtaatattactgatattcccaattcttggtataagaagcataaaatattttctgcatccacagaaaaattgtcaatttggggagatcttcaccctttgacttctccacattcattgaatggaagaatgctgattttgaggtcaacctatagacctgcatccacagaaaaattgttagttaaaaagtgaaccgatctgtgtcgatctcttcggttgtctgctccttgtcttgctatctccggttgatttctccgatctcccgcctcttgatagataagacaaaacatttttatgcaaagaaaataattgaaaaatggaggggaagtttttaaggaaaatagattttcaaaggtaatgtttgaaaaatgtcactgccaagtgtcatgtcacgtcaagcttgattaacgccatttggagttgatgtctcgagatctatctgattacttgttgggaagtattcaaagttttttctaaattgccgacaaaccctgttgaaattttgagcccatctcaaaatttctgtcccagttaattgtcttggcttatctttaaccgttggtgagtaatcacggaatttttgagatcttctcaagaattctgtcccagttgcaaatctcaaagtaacttcagtcttgactttgttggaaagatcttcttctcgagaatttttgagtccctctcaaaaattctgtcccagtttctattgtgaagaggaatagaaatcttacgggaaatatgaccgagcccttgtggcgcctacgtatcccgttgaggcaggaatcaggtcaaacgtagttcaaacaaaggggatacaattttcaaatgaagcgattacaagcaaatagaacgattacaaggaaatgacagaaagtacgaactgaaacttcacacgtaatatctcttgacagcatctgagttgatcggttttggccattcggtgccatccatctccgacaggactaaggcacctccagataacactttacaaaccatgtaaggtccttgccaatttggtgcaaatttccctttatactcnnnnnnnnnnnnnnnnnnnnnnnnnnnnnnnnnnnnnnnnnnnnnnnnnnnnnnnnnnnnnnnnnnnnnnnnnnnnnnnnnnnnnnnnnnnnnnnnnnnnnnnnnnnnnnnnnnnnnnnnnnnnnnnnnnnnnnnnnnnnnnnnnnnnnnnnnnnnnnnnnnnnnnnnnnnnnnnnnnnnnnnnnnnnnnnnnnnnnnnnnnnnnnnnnnnnnnnnnnnnnnnnnnnnnnnnnnnnnnnnnnnnnnnnnnnnnnnnnnnnnnnnnnnnnnnnnnnnnnnnnnnnnnnnnnnnnnnnnnnnnnnnnnnnnnnnnnnnnnnnnnnnnnnnnnnnnnnnnnnnnnnnnnnnnnnnnnnnnnnnnnnnnnnnnnnnnnnnnnnnnnnnnnnnnnnnnnnnnnnnnnnnnnnnnnnnnnnnnnnnnnnnnnnnnnnnnnnnnnnnnnnnnnnnnnnnnnnnnnnnnnnnnnnnnnnnnnnnnnnnnnnnnnnnnnnnnnnnnnnnnnnnnnnnnnnnnnnnnnnnnnnnnnnnnnnnnnnnnnnnnnnnnnnnnnnnnnnnnnnnnnnnnnnnnnnnnnnnnnnnnnnnnnnnnnnnnnnnnnnnnnnnnnnnnnnnnnnnnnnnnnnnnnnnnnnnnnnnnnnnnnnnnnnnnnnnnnnnnnnnnnnnnnnnnnnnnnnnnnnnnnnnnnnnnnnnnnnnnnnnnnnnnnnnnnnnnnnnnnnnnnnnnnnnnnnnnnnnnnnnnnnnnnnnnnnnnnnnnnnnnnnnnnnnnnnnnnnnnnnnnnnnnnnnnnnnnnnnnnnnnnnnnnnnnnnnnnnnnnnnnnnnnnnnnnnnnnnnnnnnnnnnnnnnnnnnnnnnnnnnnnnnnnnnnnnnnnnnnnnnnnnnnnnnnnnnnnnnnnnnnnnnnnnnnnnnnnnnnnnnnnnnnnnnnnnnnnnnnnnnnnnnnnnnnnnnnnnnnnnnnnnnnnnnnnnnnnnnnnnnnnnnnnnnnnnnnnnnnnnnnnnnnnnnnnnnnnnnnnnnnnnnnnnnnnnnnnnnnnnnnnnnnnnnnnnnnnnnnnnnnnnnnnnnnnnnnnnnnnnnnnnnnnnnnnnnnnnnnnnnnnnnnnnnnnnnnnnnnnnnnnnnnnnnnnnnnnnnnnnnnnnnnnnnnnnnnnnnnnnnnnnnnnnnnnnnnnnnnnnnnnnnnnnnnnnnnnnnnnnnnnnnnnnnnnnnnnnnnnnnnnnnnnnnnnnnnnnnnnnnnnnnnnnnnnnnnnnnnnnnnnnnnnnnnnnnnnnnnnnnnnnnnnnnnnnnnnnnnnnnnnnnnnnnnnnnnnnnnnnnnnnnnnnnnnnnnnnnnnnnnnnnnnnnnnnnnnnnnnnnnnnnnnnnnnnnnnnnnnnnnnnnnnnnnnnnnnnnnnnnnnnnnnnnnnnnnnnnnnnnnnnnnnnnnnnnnnnnnnnnnnnnnnnnnnnnnnnnnnnnnnnnnnnnnnnnnnnnnnnnnnnnnnnnnnnnnnnnnnnnnnnnnnnnnnnnnnnnnnnnnnnnnnnnnnnnnnnnnnnnnnnnnnnnnnnnnnnnnnnnnnnnnnnnnnnnnnnnnnnnnnnnnnnnnnnnnnnnnnnnnnnnnnnnnnnnnnnnnnnnnnnnnnnnnnnnnnnnnnnnnnnnnnnnnnnnnnnnnnnnnnnnnnnnnnnnnnnnnnnnnnnnnnnnnnnnnnnnnnnnnnnnnnnnnnnnnnnnnnnnnnnnnnnnnnnnnnnnnnnnnnnnnnnnnnnnnnnnnnnnnnnnnnnnnnnnnnnnnnnnnnnnnnnnnnnnnnnnnnnnnnnnnnnnnnnnnnnnnnnnnnnnnnnnnnnnnnnnnnnnnnnnnnnnnnnnnnnnnnnnnnnnnnnnnnnnnnnnnnnnnnnnnnnnnnnnnnnnnnnnnnnnnnnnnnnnnnnnnnnnnnnnnnnnnnnnnnnnnnnnnnnnnnnnnnnnnnnnnnnnnnnnnnnnnnnnnnnnnnnnnnnnnnnnnnnnnnnnnnnnnnnnnnnnnnnnnnnnnnnnnnnnnnnnnnnnnnnnnnnnnnnnnnnnnnnnnnnnnnnnnnnnnnnnnnnnnnnnnnnnnnnnnnnnnnnnnnnnnnnnnnnnnnnnnnnnnnnnnnnnnnnnnnnnnnnnnnnnnnnnnnnnnnnnnnnnnnnnnnnnnnnnnnnnnnnnnnnnnnnnnnnnnnnnnnnnnnnnnnnnnnnnnnnnnnnnnnnnnnnnnnnnnnnnnnnnnnnnnnnnnnnnnnnnnnnnnnnnnnnnnnnnnnnnnnnnnnnnnnnnnnnnnnnnnnnnnnnnnnnnnnnnnnnnnnnnnnnnnnnnnnnnnnnnnnnnnnnnnnnnnnnnnnnnnnnnnnnnnnnnnnnnnnnnnnnnnnnnnnnnnnnnnnnnnnnnnnnnnnnnnnnnnnnnnnnnnnnnnnnnnnnnnnnnnnnnnnnnnnnnnnnnnnnnnnnnnnnnnnnnnnnnnnnnnnnnnnnnnnnnnnnnnnnnnnnnnnnnnnnnnnnnnnnnnnnnnnnnnnnnnnnnnnnnnnnnnnnnnnnnnnnnnnnnnnnnnnnnnnnnnnnnnnnnnnnnnnnnnnnnnnnnnnnnnnnnnnnnnnnnnnnnnnnnnnnnnnnnnnnnnnnnnnnnnnnnnnnnnnnnnnnnnnnnnnnnnnnnnnnnnnnnnnnnnnnnnnnnnnnnnnnnnnnnnnnnnnnnnnnnnnnnnnnnnnnnnnnnnnnnnnnnnnnnnnnnnnnnnnnnnnnnnnnnnnnnnnnnnnnnnnnnnnnnnnnnnnnnnnnnnnnnnnnnnnnnnnnnnnnnnnnnnnnnnnnnnnnnnnnnnnnnnnnnnnnnnnnnnnnnnnnnnnnnnnnnnnnnnnnnnnnnnnnnnnnnnnnnnnnnnnnnnnnnnnnnnnnnnnnnnnnnnnnnnnnnnnnnnnnnnnnnnnnnnnnnnnnnnnnnnnnnnnnnnnnnnnnnnnnnnnnnnnnnnnnnnnnnnnnnnnnnnnnnnnnnnnnnnnnnnnnnnnnnnnnnnnnnnnnnnnnnnnnnnnnnnnnnnnnnnnnnnnnnnnnnnnnnnnnnnnnnnnnnnnnnnnnnnnnnnnnnnnnnnnnnnnnnnnnnnnnnnnnnnnnnnnnnnnnnnnnnnnnnnnnnnnnnnnnnnnnnnnnnnnnnnnnnnnnnnnnnnnnnnnnnnnnnnnnnnnnnnnnnnnnnnnnnnnnnnnnnnnnnnnnnnnnnnnnnnnnnnnnnnnnnnnnnnnnnnnnnnnnnnnnnnnnnnnnnnnnnnnnnnnnnnnnnnnnnnnnnnnnnnnnnnnnnnnnnnnnnnnnnnnnnnnnnnnnnnnnnnnnnnnnnnnnnnnnnnnnnnnnnnnnnnnnnnnnnnnnnnnnnnnnnnnnnnnnnnnnnnnnnnnnnnnnnnnnnnnnnnnnnnnnnnnnnnnnnnnnnnnnnnnnnnnnnnnnnnnnnnnnnnnnnnnnnnnnnnnnnnnnnnnnnnnnnnnnnnnnnnnnnnnnnnnnnnnnnnnnnnnnnnnnnnnnnnnnnnnnnnnnnnnnnnnnnnnnnnnnnnnnnnnnnnnnnnnnnnnnnnnnnnnnnnnnnnnnnnnnnnnnnnnnnnnnnnnnnnnnnnnnnnnnnnnnnnnnnnnnnnnnnnnnnnnnnnnnnnnnnnnnnnnnnnnnnnnnnnnnnnnnnnnnnnnnnnnnnnnnnnnnnnnnnnnnnnnnnnnnnnnnnnnnnnnnnnnnnnnnnnnnnnnnnnnnnnnnnnnnnnnnnnnnnnnnnnnnnnnnnnnnnnnnnnnnnnnnnnnnnnnnnnnnnnnnnnnnnnnnnnnnnnnnnnnnnnnnnnnnnnnnnnnnnnnnnnnnnnnnnnnnnnnnnnnnnnnnnnnnnnnnnnnnnnnnnnnnnnnnnnnnnnnnnnnnnnnnnnnnnnnnnnnnnnnnnnnnnnnaaagctctcacattgacctggttttgttgaacctttcccaagtcgaatttcagctgcttgagagttgaaagcgggcagatgttgagactggacctatcgttgaccaaaacatgatttataattgtcccggcatttgatggtgacgtgcagagctttgttgtgcatcctgccttcaaagggcagttcttcgtcacaaaaactgattcgatgtcctcggatggcctggtttatcatggctgctaaattgtcactgtcagtacccacaggcacataagtatcatccaaagccctcatcagagcttgcctatgcagttgtgaactcatcaacaaagcccatacagaaatctgagctggtgttttctccaaatgcttcacaattgaataatctttcggctgcatctttctccagaactcttcagcttcggcttcactaatcggcctttttgtttgttctttcttctgccccccttgagccaattcttccggggtgtagcacctgccagatctagtcatgccttgagtaacagccgcttcaataacaaattttgatcgagtaagagtctctctcggcaccaaggcaacagccttctcgggtgtcagataaaattttgagctagtgtcaactggcttgggccccactggatgnnnnnnnnnnnnnnnnnnnnnnnnnnnnnnnnnnnnnnnnnnnnnnnnnnnnnnnnnnnnnnnnnnnnnnnnnnnnnnnnnnnnnnnnnnnnnnnnnnnnnnnnnnnnnnnnnnnnnnnnnnnnnnnnnnnnnnnnnnnnnnnnnnnnnnnnnnnnnnnnnnnnnnnnnnnnnnnnnnnnnnnnnnnnnnnnnnnnnnnnnnnnnnnnnnnnnnnnnnnnnnnnnnnnnnnnnnnnnnnnnnnnnnnnnnnnnnnnnnnnnnnnnnnnnnnnnnnnnnnnnnnnnnnnnnnnnnnnnnnnnnnnnnnnntttgaatgttggaacagttgggggcgacatttcggtagtgatgagatggagtttgataatctggagggggagtttggtagatagtaggggaaacttggtagctaggaaggggagtattttgataactaggaggaggggtattttggtaactggcgggaggggtactttggtaatcagtctgtgcataacaagccgggtatgaactctgtgaaggtcgagaacgaccttggtatgatannnnnnnnnnnnnnnnnnnnnnnnnnnnnnnnnnnnnnnnnnnnnnnnnnnnnnnnnnnnnnnnnnnnnnnnnnnnnnnnnnnnnnnnnnnnnnnnnnnnnnnnnnnnnnnnnnnnnnnnnnnnnnnnnnnnnnnnnnnnnnnnnnnnnnnnnnnnnnnnnnnnnnnnnnnnnnnnnnnnnnnnnnnnnnnnnnnnnnnnnnnnnnnnnnnnnnnnnnnnnnnnnnnnnnnnnnnnnnnnnnnnnnnnnnnnnnnnnnnnnnnnnnnnnnnnnnnnnnnnnnnnnnnnccatctatatgcgaattctctgtaactctcggtcggcttctgcttcattttctccaaggagtaacgattaggaacgatctccacattgtaggcgaatcgttcaatgaagtccttagccagagcattccagctagaccactgtttcgtttcatgagacgtaaaccattctagagcctctccgctcaaacttcggctaaaaagccgcattaacaaagcttcgtctctcccaactcccacgagttggtcacagtaggccctccaggtgcgctaaggggttccccgttcctccgaagatgtcaaattttggcaccttgaacccttctgggaggtccaaaattttggatgaatgcacagatcttcgtaactcaacccggcgacatcaggaatacagttcagctccttcatggcttttctaatttcctcgttcatatctatcttggcggtctcttcctttgacctccnnnnnnnnnnnnnnnnnnnnnnnnnnnnnnnnnnnnnnnnnnnnnnnnnnnnnnnnnnnnnnnnnnnnnnnnnnnnnnnnnnnnnnnnnnnnnnnnnnnnnnnnnnnnnnnnnnnnnnnnnnnnnnnnnnnnnnnnnnnnnnnnnnnnnnnnnnnnnnnnnnnnnnnnnnnnnnnnnnnnnnnnnnnnnnnnnnnnnnnnnnnnnnnnnnnnnnnnnnnnnnnnnnnnnnnnnnnnnnnnnnnnnnnnnnnnnnnnnnnnnnnnnnnnnnnnnnnnnnnnnnnnnnnnnnnnnnnnnnnnnnnnnnnnnnnnnnnnnnnnnnnnnnnnnnnnnnnnnnnnnnnnnnnnnnnnnnnnnnnggaggggggatttgagctggaggtcttccgtctggttgagtgttgacagcaaaaatcggaggaggcaaatcttgttttctctgcatctcgaccctcatctcagcaatttgttgcatcaactgtaggatcagttcattctgatcagcaagggctggctgagccaccacgacatcagtaagactggtttcttcgttgttatcacccattgctgtttttcctttttgggaactttggctgggaaaggaatctgtaggccctttagatctagtgaaataaggatgatcggccagtgtatcaacacagatcagttctaactacctgtagagaaaaataactcaaaggcaaatctgttagtattagttctggatgaatgatgcaagatatcacatagaaagcagataaacacatatgagttgcttcgtttgagaacatgttaacccacgaataatggggactgattttttgaacgagcaggaatttgctcgttttattttgaggcgagcgactcagaaaggctaaattgcgttgagctaaggtcttcttgctgcatcttctggcatctgtcgatctgaatacaatgtttccttgtagaataaaagggggaaaagaaaaatttgaaaaagataggggccgggccttgaaaggctgcctacgtatctccgaaggagaattcaggccctacgtagttcgaatacaaaggaaattttcattctcattcattcatttctggtgactacaaggaaagtgaaaaacagataataaaactcctaaaagataaatggtgccttcgacggagcttcttcctctgactgccgtattagccacggggggtaaactcatatgcttcgaaggcggtttcctcattttcttctttccatcgtcccttgaaaggaggtctatagacaatttcctcctcaagttcatcttcaacagattcgggtnnnnnnnnnnnnnnnnnnnnnnnnnnnnnnnnnnnnnnnnnnnnnnnnnnnnnnnnnnnnnnnnnnnnnnnnnnnnnnnnnnnnnnnnnnnnnnnnnnnnnnnnnnnnnnnnnnnnnnnnnnnnnnnnnnnnnnnnnnnnnnnnnnnnnnnnnnnnnnnnnnnnnnnnnnnnnnnnnnnnnnnnnnnnnnnnnnnnnnnnnnnnnnnnnnnnnnnnnnnnnnnnnnnnnnnnnnnnnnnnnnnnnnnnnnnnnnnnnnnnnnnnnnnnnnnnnnnnnnnnnnnnnnnnnnnnnnnnnnnnnnnnnnnnnnnnnnnnnnnnnnnnnnnnnnnnnnnnnnnnnnnnnnnnnnnnnnnnnnnnnnnnnnnnnnnnnnnnnnnnnnnnnnnnnnnnnnnnnnnnnnnnnnnnnnnnnnnnnnnnnnnnnnnnnnnnnnnnnnnnnnnnnnnnnnnnnnnnnnnnnnnnnnnnnnnnnnnnnnnnnnnnnnnnnnnnnnnnnnnnnnnnnnnnnnnnnnnnnnnnnnnnnnnnnnnnnnnnnnnnnnnnnnnnnnnnnnnnnnnnnnnnnnnnnnnnnnnnnnnnnnnnnnnnnnnnnnnnnnnnnnnnnnnnnnnnnnnnnnnnnnnnnnnnnnnnnnnnnnnnnnnnnnnnnnnnnnnnnnnnnnnnnnnnnnnnnnnnnnnnnnnnnnnnnnnnnnnnnnnnnnnnnnnnnnnnnnnnnnnnnnnnnnnnnnnnnnnnnnnnnnnnnnnnnnnnnnnnnnnnnnnnnnnnnnnnnnnnnnnnnnnnnnnnnnnnnnnnnnnnnnnnnnnnnnnnnnnnnnnnnnnnnnnnnnnnnnnnnnnnnnnnnnnnnnnnnnnnnnnnnnnnnnnnnnnnnnnnnnnnnnnnnnnnnnnnnnnnnnnnnnnnnnnnnnnnnnnnnnnnnnnnnnnnnnnnnnnnnnnnnnnnnnnnnnnnnnnnnnnnnnnnnnnnnnnnnnnnnnnnnnnnnnnnnnnnnnnnnnnnnnnnnnnnnnnnnnnnnnnnnnnnnnnnnnnnnnnnnnnnnnnnnnnnnnnnnnnnnnnnnnnnnnnnnnnnnnnnnnnnnnnnnnnnnnnnnnnnnnnnnnnnnnnnnnnnnnnnnnnnnnnnnnnnnnnnnnnnnnnnnnnnnnnnnnnnnnnnnnnnnnnnnnnnnnnnnnnnnnnnnnnnnnnnnnnnnnnnnnnnnnnnnnnnnnnnnnnnnnnnnnnnnnnnnnnnnnnnnnnnnnnnnnnnnnnnnnnnnnnnnnnnnnnnnnnnnnnnnnnnnnnnnnnnnnnnnnnnnnnnnnnnnnnnnnnnnnnnnnnnnnnnnnnnnnnnnnnnnnnnnnnnnnnnnnnnnnnnnnnnnnnnnnnnnnnnnnnnnnnnnnnnnnnnnnnnnnnnnnnnnnnnnnnnnnnnnnnnnnnnnnnnnnnnnnnnnnnnnnnnnnnnnnnnnnnnnnnnnnnnnnnnnnnnnnnnnnnnnnnnnnnnnnnnnnnnnnnnnnnnnnnnnnnnnnnnnnnnnnnnnnnnnnnnnnnnnnnnnnnnnnnnnnnnnnnnnnnnnnnnnnnnnnnnnnnnnnnnnnnnnnnnnnnnnnnnnnnnnnnnnnnnnnnnnnnnnnnnnnnnnnnnnnnnnnnnnnnnnnnnnnnnnnnnnnnnnnnnnnnnnnnnnnnnnnnnnnnnnnnnnnnnnnnnnnnnnnnnnnnnnnnnnnnnnnnnnnnnnnnnnnnnnnnnnnnnnnnnnnnnnnnnnnnnnnnnnnnnnnnnnnnnnnnnnnnnnnnnnnnnnnnnnnnnnnnnnnnnnnnnnnnnnnnnnnnnnnnnnnnnnnnnnnnnnnnnnnnnnnnnnnnnnnnnnnnnnnnnnnnnnnnnnnnnnnnnnnnnnnnnnnnnnnnnnnnnnnnnnnnnnnnnnnnnnnnnnnnnnnnnnnnnnnnnnnnnnnnnnnnnnnnnnnnnnnnnnnnnnnnnnnnnnnnnnnnnnnnnnnnnnnnnnnnnnnnnnnnnnnnnnnnnnnnnnnnnnnnnnnnnnnnnnnnnnnnnnnnnnnnnnnnnnnnnnnnnnaaatcgataatacaactttcgaagtggaatatttgacccgggcagcctgtccatccattcagctttgacgagtgacaatttttctttgatttcggcaaaatcccatacttttggaaagagaagatcagtatcgggttggtgtttcctcttgttgcacatgccgacactctcgtaactggcgaggacttcatctatagtcggagtcaactctacttccccaaaccgaaataccatgttgttgctgtcccaaaatttcaccatcgttccaatcaagtcagggtaagccaccatttccattaatgatgggagatggcctatgtgtctttgcactttctttttatcctccttgttcatgaatttccaccaaacttggagataagggtcaggtatagtcaccattcgagttctcaacggctcaaacgttggattcatcctacaagaaaacaaacaaaggtaagttaacccccacccccacttgataatcgatttgtttaaaaaatgacatatacatccttcaattaaaacacataagtatgattgtctttttattggcaaatgggccaaatagacacaaggtgggcttctaatgggcccaacacgccttaggcgttgggtcgacctagtttaaaatgcgctaaaatttgggatttggtttcgctctacgctagttgactaagagtggctttgaaagaccgggaacccaagtggacaacttaggctgaaattcacgacaaccattggacgcatgacgtaccaataaattgccgatccttccgaaaaagggttgagtataaaaagtccggctgcgattatgcagaaaccgtccttaatatactatacagataataggaagatgccatgaaatgcaatgacagttatattaattaaaacactttgagagcaaataaacaatttagcaattaatacaattagtcaaacaagtcaaatcttatggttagaacttaattaaatccccagcagaagtcaccattttgttttacttaaaaatatatagaaagggaaaatgaatgagttttcaaaaaatcgattaaacttggaaaaatgactgagtttccggaaactcgattaaacttatggtttaagagaaatcgaatttccaaaaggacagagtcgccacttaatttttagtaaaaaaaatcaagaaaaaatataaggtttttcaaaaagattcaaacagataaaatcgattgaaaacaagggttcgagttcaatgtacgttccgagaaggtattaggccctcggaatgcccgctaactcgcggttgaccgacgatttgaccaaaatgattttttgactaattttgaaattttaacttaagtaaaagaatttatttattttaactaattattttttaaaatttaactgagtaaagaactcatgactttgactaatcttgaaaatttaacaaaagtaaaagaactcatttatgactatttttttttattctaactaaataagagaacttacttattttaactaactttgcaattttgactaaataaaaggactcatttatattaactatatatttttttttttgaaatttttaacttagtaaaagaactaatttatattaactatattttttatttatttatttatttttgaaattgacttagtaagaaaactaatttatttcgaaattttaacttagtaagaaaactaatttatttcaacttatttatttattacccttaatattttatcactttatttattttaagggggaatgaactaaaggaaaattttcaaaaaggggaaatgacttaagtgacaagacaaataaaattaaagctaagtataacacaaagatactttaatttatatatataaaaaataatttatttattttttttttttaaaataaaatgaaaatggctatcttgaggaatttagttaaattagaatcataaattaaacaaagttagtcaaacacaatatcaataataagggagggaaaggaaataatcaaatttgggcctttcccacatcttggaccttgctgaaattgtctaaggcctttgggcctattttgcttatggaaaaatctgcgtataccctttacgtatatcactgtatatggaccgtgtttgggtccgaatttctgcgttttttccttgaacaatagctattgacttatgtcttatcatcagacttgtatcctcgtattttgcaacctgtaaaccatatttcttgctgtatacgagtgtatatagcaggtatatcacccctttttgggccttttgagacctgcaatcagccattaaactgtacacctgcttccttggcttcacatattaatccattgggactcgattttaaaggtaacatcgaaagaagtgcaaggatggagtccaaagtgaactcgaatcggtgtcacatgcgacaaagtaaagagagaaagaaattaattaatagggtaaaaggaatataacattcgagggtatcaacaagcaatttagtactaccagtaagtaggggaagacacaaatagaaaacttaacttactcttaaaataggatagcaacatatgcaaagaagatatcaattagtctacccactaccaagataggacgaatctatttccatttttatgccgtaaaatactacccattagatgtgatcacgagatggacatcaactgtatatatattcaaaaaaaagaatgcaagcaagatatgttctaactggtgcatgcatcattaaagggaaataaagaagagagaagaaataaaataaaaatataaaaataagaaaataaaaataaaaaaaaatataagaaaaaaaaaaaaaaaaaagctaacaaaagaaagtggtttgacaatttgctagacttaatctaagctcaaccggagaattctcaaatggacacttagtcacgtattgtatgcaaatcatgaataacatcaaatttaattcatttaaagaatctaaattaaacaatctcaaggataagagcacacacaacttgcttggtgattaacaaaggggcttaaccttagacactacaaagaaactagtggaaaaaaaatgatttaactttgacaaaaaaagttactgcctcagggaaataaaaatcaaacctcacatttcacctcactatttcctacttaaatcacagtaaataagccaactacacatagctaacattattcgtgttgcaactactcatagtaaggagcaaaacaactagaaagaaagaatcagtttatcattttttcgctactcgaaaattaactaatctcataaccacaagtaaaatattggacagaatggaggcatagacttgactcaaacacacatgttaaaccatagtacaatcatgagattcgcaactggagaaaacaagttgtcatatccaacaagcaataggcaaaacaacatacaactttcatactaatcagttataagattcaatcctcatcttgaaaatccaataacatcaatagtagcttaaagacgatgaaaataaagagtacgaattcaccgacattcaagtaaatggacgagaagaaaacaacaagacaaacccaaatggagaaataacaacatcaattacgaaacgacaaaatttttgaatccacgctaagagtaaatactaaaatcgattcaagatagacatagtaccaagacaccaagaactcaaataaccaacacatgagacgaaacaagataaggatgaggtcgttaccttcttctgggcagcgaactggataacaaacgagcagaacgaactcttccaccacacgaccacgaacgccaacagcgaaccaaagaactaggtggaatctcaaatgaacttgtggtaggcaaaaaatgaaggaatggaacttggactagaattagttatctcctcttctcctctgatttctttagtgcatttagtacatccctattctcgcctaaactagtttcttcaaaaaatccccccctcccctccaaccgtgagcaaaagggaatacatatagggattatctagggttccccctttctttctttttttttttttttcggagggaaagaaataaaaatccccttcaaaagccaaattcaaaattcaaaaaaaaacttccaaaacctttcacccttccggctgaacaccttttctttgagattttggttcattcccaaaggggaaaggaggacagaggcgtgcctgctatagtgctgtggagagagacgttggctgctgtcgagcatttaatggctctgtcgttttcccgctggcgtgaagacgttgtggtcttactctgtttggtcgctgccgctaatgctgggatgtcatactgttgttcctgggtttctattgtgaaggggaaaggaatttgggccgggtttaaggagttatgggctgggaattgaagtgggttggttgggcttgggaattgggctggtaattaaaggaaataaagaggataagactattgggaatggggtcgactggtattgttgttcacaaattgttgttgtattattaatgtaagtaatgtgtgggattattggaatggggttggaaaatgggctgggagttataaagggaattggaccgatttttggtattaagaaaatggcccaaaatggttcttaaatgggtttatggtgaggtgagttagattaaatttagggaatagctttagagattaattcggctagaatctaaatgaattaatattaattaattagcgagcttcttaatcttaacgaagtaaaataattaacttaattataaactaattactttaacaatatacacgactaaataaccaaatatttaaataagctaaaatcctttcgagacaattttgaacattcgtaaaatatactaattagacacataattatatactaattaacttaattataaactaactatttaactcaaaattgtaaactattagataactaaacaaactaaccaaatatctaattaaacaaaatctttttgagacgattttccaatatttataaaatacactaattatatacataattatataaaagacatattattatttaaaaattataacaagtgacaaactatttgaaacaacttgcaaattattctattatatttttttattttttatttttgaaatttctaaaattaattactttaaaacatttgaaaattaagaagctcgaaattaattattatcggggagggtcaaaattaggtgtcaacaggcgtgatcttactgattgtctgatgaaaatcctgaccgaaagaggttattcattcaccactagtgctgaacgggaaattgtccgcgatatgaaagagaaactagcatatgttgcacttgactatgagcaagaattggagaccgcaacgagtagctctgctgttgaaaaaagctatgagttaccagatggtcaggtgattaccattggagcagagaggttcagatgcccggaagtcttattccagccatcacttgtgggaatggaagctgctggaatccatgaaacaacttacaattccatcatgaagtgcgatgtagatatcagaaaggatctttatggtaacattgtcctcagtggtggaacaacaatgtttcctggtattgctgatcgtatgagcaaggaaattaccgctcttgctcccagcagcatgaaaatcaaggtggtggcgcctcctgaacggaagtacagtgtctggattggagggtctatcttagcttctctcagcaccttccaacaggtaatacataacataacacgtgtagctcacactattacaatgcttgcacgtttcctcaaactcttgctttgtagagctgtatgtatttgttaattttttagctgggaccattgcctgattttgtttctttgaactactggcagatgtggataacaaagggtgaatatgatgaatccggtccttccattgtccaccggaaatgcttctaagctgatcgtgagtggagttcaatgttctcgttatctgcttcaacagtttggtcatagttctgagcaggactttgttaaagttggaatgttttgagttcataaagatggaaggtttatactgtgctataatagggtgtaagcttttagatcgtacccaatcttttcttaatgtcatttgagtgttagtgttgcctactgttttaggtgtttagaggtgagttcttttcctcctcgcttttaatcttcttgttcttctggatttttggattgtttttttccgcatatacttcttatatactgagtaatgtcacttcatggcttataaatctttggtatatggtgttctctgta

SEQ ID NO: 104 - DNA, 3403 bp, Solanum tuberosum
  source 1..3403: mol_type = genomic DNA
tcttcttctttttcttctttttcttctttttctcctctttcttaacaaagcactatccatttttcgatttcactcatacgcacgcaaattctacctctaaatttattgaaaaaataaaataaaaaggtgagtgtatgaacaatcatatatgttcttcaattaattttacgtcttcttcattttattattactactcttctccagctcaaactcggctagtacatgtgatctgtgaaatatttgctttcaatttttcagagtcaaataagtttttattcatatgtcttgtaaatattattgtggtttgcgtctattattactttcttgaatatgtacatttattgaaagtttagactcttgaaacttgaaacgtgttaatgtgtcacataaattagaacatagagcgtaattttactggttcattgttatgtattcgttttcccgttaggtgactctgttgcaatatatttgtttgccatttccttcattatttatgtgtgtttaacttctcttgaatttttaattgattggtttatgagactgattttctagaaatccttgttgtgcaaattgaaaatattatgagaaatttttaacgattacgtaaatgtgaaacgacagtctaatattttgtcaattcctagggttacattgtgcgactttaaaaaattagggataaaatctaaatagtggcctagaaaaggaacatttgtgtaaatcaataatatttgagcttccaaatctttagttgagccatgagcatttcttggaatgttaaaaggaaaactacaaagaacttggagatcctggggaaactttgtagtgaaatttatctagcctctgtaaaatactagtttcaatttatgtgatgttgtttgatttgatacagaatttaagaaaaaaaggaacacttttgaaatttgtggtcgtttgtgtagctacaaatccttgtcattttaaagataaattgttattaaatatagaaatgtgtcatcgtttttttgtataggctacaaagtaaattgtgtcaaataaattgagacagaaggagaataagatattgcatatgcaaccagattagagcttaattgggttttttagttgtatgtatgtatcaaattgtttcttggaaatcttatttcgtatagtttaaggatatttttgttgtctaaggtattatttgttgctaacttatttgttcttcaatagttgtataaaaaatggctgatgttgatgatattcaacctcttgtttgtgacaatggaaccggcatggtcaaggtaatgaattgaaccatcaattattaccattttgattgaagaaattcgaaaaattctgttctcagctatagtatatgtttcatatataggctggttttgctggagatgatgccccgagggctgtttttcctagcattgttggacgtcctcgtcacactggagtgatggttggaatgggccagaaggatgcctatgttggagatgaggctcagtcgaaacgtggtattctgacattgaagtatcctattgaacatggtattgttaataactgggatgacatggagaagatttggcatcacactttctacaatgaacttcgagttgctccagaagagcatccggttctgctcactgaggcacctctcaatccaaaggctaatcgtgagaaaatgactcaaatcatgttcgaaacattcaattgccctgcaatgtatgttgcaattcaagctgttctgtctttatatgctagtggtcgtactactggtaagatactcacattctgtaattctttttttttggacgttgatcatgttccaattttctataattaaggatccgttcttactaggaatcgatctcatggatattagtactgtcacgtattaaccaggggagttatatgacttttagtgacccttttgttgatgatttttgtcggagatgtcattagttattactgataattgtgagtatggctggagaagtgttagaaaagatgaggaaatttgtggaatgattttactaacttggtaacaagtgaagaagcaacttagggtggttttcgaaatgttttgatatgcttttccttgagctgaggttctattggaaatagactttctaccttccaaggtatgggtaaggtctgcatacacagtaccctcccagatcccacttgtgggattacgctgagtaagttgttgttggttaacatgaaaagtatatgattcttgtctgccttgtaggtattgttttggattccggagatggtgttagccacacagttcctatctacgaaggttatgcacttcctcatgcgatccttcgtcttgaccttgctggtcgtgacctcacagagcatttggcaaagatcctcacagagcgtggatactcattcaccaccagtgctgagaaggaaattgtgagagacatgaaggagaagctggcatacattgctctagactttgagcaggagttggatatggttaagtcaagcagctctgtcgagaagaactttgaactgccagatggccaagtgattaccattggagctgaacgtttccgttgcccagaagtgctgttccagccttccacaatcggaatggaagctgctggtatccacgagacaacatacaactctataatgaagtgcgatgttgatatcaggaaggatctgtatgggaacattgtacttagtggtggatccactatgtttcctggtattgctgacagaatgagtaaggagatcaccgcgttagcccctagcagcatgaagattaaggttgttgcaccccctgaaaggaagtacagtgtgtggattggaggttccatcttggcatccctcagtaccttccagcaggtaagcattagtttttcaattaagtatattcgagaacagcctttctacctccatgaggtagtggtaaggtcttctctgcgtacactctaccctctccagactccacttagtgggatttcactgtgtatgttgttgttgttagtcagtatctttgtgatgattgatgcttaaaatatttgtgttctttgaaatgtagatgtggattgcgaaggcagagtttgatgagtctggcccatcaattgtgcacaggaagtgtttctgatcagagcaaagataatctatgtctctctgatatcgcgctacgcctatgttctttttgttttgtttctttatatatcagcttttggatagttattattgcctgttgaactaatttcaggtttctagtttcatttgattgtctatgatgattttgtcaaatttgcatgtactcattcattttttttctttatttttatagtccaggaggactaatgtaataagttgttcaactcacttgaagtgtgtgcttttcattatatgcattgctcaaggatgttttgttgta

SEQ ID NO: 105 - DNA, 1898 bp, Solanum tuberosum
  source 1..1898: mol_type = genomic DNA
ttagaaaatggctgacgttgaggatattcaacctcttgtttgtgacaatggaactggcatggttaaggtaacaaatttgctttccaaatgtcgtcgtttttaatctgctttgtgaattcaatttgatgttgtatatcttttctttcttgcaggcaggatttgctggagatgatgcacctagggctgtatttcctagcattgttgggcgtccgcgtcatgctggagtgatggtaggaatgggacagaaggatgcatatgttggtgatgaggctcagtcgaaacgtggtattcttacactgaagtatccaattgaacatggcatagtgaataattgggatgacatggaaaagatttggcatcatacgttctataatgaacttcgagttgctccagaagaacatcctgttctgcttactgaagcacctctcaaccctaaggctaatcgcgagaaaatgactcagataatgtttgaaacattcaatgccccagcaatgtatgttgctatccaagctgttctgtctttgtatgctagtggacgtacaactggtaagatatatttactgttctttgtttcgaatgttaattttcctttcatgttgctatgttttcttcctctatcgtttttccccttttcataatgatttgctgcacttcagtgaaaggggtccttcgggatgtaaatagtgaattgtagtcaaatatgattcatgttttcttgcaggtattgtgctggattctggagatggtgtgagccacacagttcctatatatgaaggttatgcactacctcatgccatcctacgtctcgaccttgctggtcgtgaccttactgagtacatggtgaagattcttactgaacgcggatactccttcactactactgctgagaaggaaattgtaagggatgtgaaggagaaattggcataccttgctcttgattttgagcaagaacttgagacaaccaagacaggctctgctgttgagaagaactatgaactgcccgatggacaagtgattactattggtgctgagcgttttcgatgtcctgaagttctttatcaaccttctttgattggaatggaagctgctggaattcatgagacgacgtataattctataatgaagtgtgatgttgatattagaaaggatttgtatgggaacattgtgcttagcggtgggtcaactatgtttcctggcattgctgatagaatgagcaaggaaattcaagccttagcaccaagtagcatgaagatcaaagtggttgctcctcctgaaaggaagtatagtgtctggattggaggttcaattttggcatccctcagtaccttccaacaggtgagcattttccttccgttatttttactagctcaactaatctggattcacactgtaaaaaccccccaccatggagggtcttacccgacctaccatagagggacatttccttcatttgtttgggtttaataacctagttcccaaaatccactagcttgactaatttggattcatgccatagaaatcccagtatatggggttttgcccaccctaccaaagtgaagcattttccttcatttttttggtttaaccacctggttcccgaaacctacactagcttgatcaatttggattcagatcgtagaaatccattatgggctttttttgggatcctaccaaagaggggcattttccttcattgttatacatgtgtgcttgattttcaactgattgagttatttatctttatgttgataatgatgataattaacatatttatcattgtttggatttgtagatgtggattgctaaagcagagtatgatgagtctggcccctccattgtgcatagaaagtgcttctaatcagaacaaatgttgagtctggttcaacatttgagtttct

SEQ ID NO: 106 - DNA, 24625 bp, Solanum tuberosum; identical to SEQ ID NO: 103
  source 1..24625: mol_type = genomic DNA

SEQ ID NO: 107 - DNA, 2017 bp, Solanum tuberosum
  source 1..2017: mol_type = genomic DNA
actctttcttgtgttaacagctggtgatttcaactggaaatatgaaaatcgtatatctcgttgagctagaaaagagaatcaaactatgcataaaggaaaatatttctcactgacttgtaaaattatgcttccaaaataagttttccaagtccttacaagatggctggtgtgatggatattcaaacacttgttatcgacaatggaactgaccgatccatggttagtaataacaaaacacttacaatttcagctttattcattgtgttgctctttagtggatattcaaacacttgtttctttaggctgggtttgctggggatgatgctccaaggactgtttttgaaagtatagttggtgttcctcgtcatactggcgtcatgcttggtatgggacaaaaagatgcctatgttggtgatgaagctcagcgtaaaagaggtatgttgactctgaaatatcccatggaacatggcatggtaaaaaactgggatcatatggagaaaatttggcatcacatattttacaatgaactccgtattgatcccgaggagcatcccattcttctgacggaagtgccacttaatcccaaagcaaaccgggagaaaatgaccgaaatcatgtttgagaaattcagtgttccatccatgtatgtcgcaatccaggctgttctctctatgtttgctaatggtcggctaactggtaagcagaagaagaaatactggttctctactgtttaattttagccagtcacttgtttgtaatttttcaaccaggcattgtgcttaattctggtgatagtgcgaccaacacggtccccatctatgagggacatgcacttcctcatgctatctcgtggttaggtcttggtggtcgtgatattacatattacctcacgaggattctctccgacggtggttatgtatttcacggtacaataagagaaaataatgttactaggcgtatgaaggagacaattacttatgttgcactggattttgaacaggagattgaaaaggcaaaaaacagatgttcagttgagaaggcctttgagcttccttctggacaagtccttaatgttggtgctgagaggttccgttgtcctgaagtcctattccagccatctttgctcaggatgggatcgacaggaatccatgaaaaagtctacaattcaatcatgaaaagcgatgttgatattaggaaggatttatttgcaaacattgtgcttagtggtggctcaactatgtttcctggtatagcagaacgtatgagtaaggaaatcactgctcttgctccaaggggcacgaagatcaaagtggtagcaccacctgagaggaagtacagcacctggataggaggatcaattctagcttccgtcaatagtttcgaaagagttagtttctccttactttatttgacttatcaataaatcaatctaccaagtcttggtctcgaacgattagttctaactatgaacgtcttcttgttaacttcttttaagctcaagggattcaacactaatagctacatcctatgcagatgttgataacaaagggcgagtacaatgaatttggtgcctcaattgtccacaggaagtgtctctaagctttatgtgaacttaaaattctctttcaagctgactagattgtcattttaaagttgaacaaacattagtaacatcattgtgaacctatgttgataaactacaaatggaataaatcattaatgtggctatactaatagtataacctagctagctggatgaattaatactcatcaagcagtacgtcaacatttggtgatgctggaggaaacttcagcagttcaaggtaaaagctccagactccatcatccttgagtgatctcgtaagtctaactgtcacctctacaagtgcaacgagccagcaaaaccttcataaaaacaagttgttaagtatagggaatgattcagtgaaagctattactagattgtaattgcaactgtaccgaatatcactacaccaaagaaggattttaatatata

SEQ ID NO: 108 - DNA, 1482 bp, Solanum tuberosum
  source 1..1482: mol_type = genomic DNA
atggctgatgggatagatattcaaacacttgttatcgacaacggaactgcacgatccaaggttagtaagaacaaacctcttgcaatttcagctttattcattgtgttgctctttaatggatattcaaacacttgtttcattaggctgggtttgctggggatgatgctccaaagactgttttcaaaagtatggttggtcatcctcgtcatactggcgtcatgcttcgtatgggacaaaaagatgcctatgttggtgatgaagctcagcgtaatagaggtattttgactctgcaatatcccattgaacatggcatggtaaaaaactgggatcatatggagaaaatctggcatcacatattttacaatgaactccgtgttgctcccgaggagcatcccgttcttctgacggaagtaccacttatccccaaagtaaacagggagaaaatgaccgaaatcatgtttgagaaattcaatgttccatccatgtatgtcgcaatccaggatgttctctctctgtttgctaatggtcgcctaactggtaagcagaagagaagaaatactggttctctactgtttaatattagccagtcactaatttcatttgttaattttcaaccaggcattgtgcttaattctggtgatggttcgacccacacggtccccatctatgagggacatgcacttccccatgctatctcatggttaggtattggtggtcatgatcttactgattatttatgggagcttatcagagaaggttttgcatgtaacgtagcaatagaagaaaatatttgttggcgtatgaaggagacaattacttatgttgcactggattttaaacaggagattgaaaaggcaaaaaacagatcttcagttgacaagggctttgagcttcctgatggacaaatcttttatattggtgctgggagtttccaatgtcctgaagtcctatttcagccatcactggtcggaaagggatcgacaggaatccatgaaaaagtctacaattcaatcatgaaaagtgatgttgatattaggaaggatttatttgcaaacattgtgcttagtggtggctcaactatgtttcctggcttagcagaacgtatgagcaaggaaatcattgctcttgctccaaggggcacgaagatcgaggtgattgcaccacctgagaggaagtacaacacctggataggaggatcaattctagcttccctcaatactttcaaaagagttagtttctccttactttatttgactaatcaataaatcaatctttcaagtcttagtctcgaatgattggttctaattatgaatgtcttcttgttaacttcttttaagctcaagggattcaacactaataactacatcctatgcagatgttgataacgaagggcgagtatgatgaatatggtccgtcaattgtccacaagaggtgcttctaagcttttgtgagaacttaaaatcctctacagttagttcaggg

SEQ ID NO: 109 - DNA, 1433 bp, Solanum tuberosum
  source 1..1433: mol_type = genomic DNA
atggctgatgggatagatattcaaacagttgttatcgacaacggaactgcacaatccaaggttagtaagaacaaacctcttgcaatttcagttttattcattgtgttgctcgttgatggatattcaaacacttgtttcattaggctgggtttgctggggatgatgctccaaagactgttttcgaaagtattgttggtcgtcctcgtcatactggcgtcatgcttggtatgggacaaaaagatgcctatgttggtaatgaagctcggcgtaatagaggtattttgactctgaaatatcccattgaacatggcatggtaagaaactgggatcatatggagaaaatctggcatcacatattttacagtgaactccgtgttgcccccgatgagcatcccgttcttctgacggaagtaccatttaaccccaaagtaaaccgggagaaaatgaccgaaatcatgtttgagaaattcaatattccatccatgtatgtcgcaatccaggctgttctctctctgtttgctaatggtcgcctaactggtaagctgaagagaagaaatactggttctctactgtttaatattagctagtcactaattacatttgttatttttcaaccaggcattgtgcttaattctggtgatggttcgacccacatggtacccatctatgagggacatgcacttccccatgctatctcatgcttaggtattggtggtcgtgatcttacttattatttatgggagcttatcagagaaggttttgcatgtaacgtagcgatagaagaaaatattatttggcgtatgaaggagacaattacttatgttgcactggattttgaacaggagattgagaaggcaaaaaacagatcttcagttgacaagggctttgagcttcctgatggacaactcttttatattggtgctgggagtttccaatgtcctgaagtcctatttcagccatcattggtcggaaagggaccgacaggaatccatgaaaaagtctacaattcaatcatgaaaagtgatgttgatattaggaaggatttatttgcaaacattgtgcttagtggtggctcaactatgtttcctggcttagcagaacgtatgagcaaggatatcactgctcttgctccaaggggcatgaagatcgaggtgattgcaccacctgagaggaagtatagcacctggataggaggatcaattctagcttccctcaatactttcaaaagagttagtttctccttactttatttgactaatcaatctttcaagtcttaatctcgaatgattggttctaactatgaatgtcttcttgttaacttcttttaagctcaagggattcaacactaataactacatcctatgcagatgttgataacgaagggagagtatgatgaatatggtccctcaattgtccacaagaggtgtttctaa

SEQ ID NO: 110 - DNA, 3331 bp, Solanum tuberosum
  source 1..3331: mol_type = genomic DNA
atggctgatgggatagatattcaaacagttgttatcgacaacggaactgcacaatccaaggttagtaagaacaaacctcttgcaatttcagttttattcattgtgttgctctttaatagatattcaaacacttgtttctttaggctgggtttgctggggatcatgctccaaagactgttttcgaaagtatagttggtgttcttcgttatactggcatcatgcttgctatgaaacaaaaagatgcatattttggtgatgaagctctgcataaaagaggtattttgattgtgaaatatcacattgaacatggcatggtaaaacactgggatcatatggagaaaatatggcatcacatattttacaatgaactccgtgttgctcccgaggagcatcccgttcttctgacggaaataccacttaaccccaaagtaaaccgggagaaaatgactgaaatcatgtttgagaaattcaatgttccattcatgtatatcgcaatccaggctgttttctctctgtttggtaatggttgcctaactggtaagcagaagagaagaaatgctggttctctactgtttaatattagccagtcactaattacatttgttatttttcaaccaggtattgtgcttaattctggtgatggttcgacccacacggtcgccatctatgagggacatgcacttccccatgctatctcatgcttaggtattggtggtcatgatcttacagattatttatgggagcttatcaaagaagtttttgtatgtaaagcagcgatagaagaagatattactaggcgtatgaaggagacaattacttatgttgcactggatattgaacaggagattgagaaggcaaaaaacagatcttcagttgataagggctttgagcttcctgatggacaactctttcatattggtgctgcgggtttccaatgtcctgaagtcctatttcagccatcgttggtcggaaagggactgacaggaatccatgaaaaagtctacaattcaatcatgaaaagtgatgttgatattaggaaggatttatttgcaaacattgtgcttagtggtggctcaactatgtttcctggcttagcagaacgtatgagcaaggaaatcactgctcttgctccaaggggcacgaagatcgaggtgattgcaccacctgagaggaagtacagcatctggataggaggatcaattctagcttccgtcaatactttcaaaagagttagtttctccttactttatttgatcaatcaatctttcaagtcttagtctcgaatgattggttctaactatgaatgtcttcttgttaacttcttttaagctcaagggattcaacactaataactacatcttatgcagatgttgataacgaagggcgagtatgatgaatatggtccctcaattgtccacaagaggtgtttgtaagattttgtgagaacttaaaatcctcttcaattagttcagggaccagcagcataaatattgagcagtctgttttcgtttttccttgcttggcttggcttcttttctttgtaaattagctggtatacaggaaactgataatattataacttagatttttaagaaacaattatgaacttggtattggagtacaaccagtcgagaactagcttgagtaggatcttgtagaggtaaggttttctgtcctaaacaagatagaggtcaatgtcaaaaccccgtcaccacagaggtgaatgcctgagtgaatgaatgtgttgtgaaccaagctgactccataagggcttgtgggctaaaagtggtgaatgagactgattcagttttaactattaggccaagtaaaatattagagagttttatttgagatccagactcaattaccatttgttagaaaggactagaagttagaaagaacggttattcaaattgttatggtgcatctctatttcctcatcccttttctttgatcagttctgcttctcatccctttcttctatctttgttcttcaattccccttttatttcttaaattcctttgtaattccaattaatatggctatactaatagtataatctaattagctggaattaatactcatcaagcagtatgtcgacatttggtgatgctggaggaaactgcaacatgtcaaggtaaaagctccagactccatcatcctcgagtgatcttgtaggcttaactgtcacctctacaagggaaggttaacgtgccaacaaaatcttcatgaaaacaaattcagcaaagttccatgactttaggaaataaacaaataaattctaacaagttaaaccttctccaaaattcataattctgaatggtagtgtcgcccaccaaaatgctcaacatttttagctcaggataggctttgaggaacttcaaatccacgtaatgactttcaagaatgaacaagtaattaagcatcgggggctgaaatattgaggaattggatatcattacaacctgtaagcttcaaggtagagagcaatggagccacgagggcgttattctccaaaatttgataaaaaataatatgccttaggtcgatggtcacaactcacaagattcaaggcaatttgaaggtacaatttgttatcttaaaatatctcaattgtgatgatgaagagttgaataggaaagaagacaaaggttttggatggcgagttcctaaacacctccggtagagcaacgaatgatcaatatctgaattactcaaatcaacactcaaaatatcgagaacaaacttgataatagggccattgtgttgcaagaggattttgtagacaatgttaggactgtgcaaataatgtggtgatgtacgtgttcaagtcgctttgaagtaatttgaataatttcagcatgtcttttctctacctagttataaaaagttacattattgatcttgaaatgacagtttaaaacttttgatcccgtttgccctacggataaactttaaggtaaaataacttgtgcttattggtgactcaactttggtccctggcgtagcagaacgtatgagcaaggaaatcactgctcttgctccaaccagcatgaagatcgaggtggttgcaccacctgagaggaaatgcagcaccaggataggaggatcaattgtagcttccctcaatactttaaacagagttagtttcttttttgctttatttgacctatcaacgacgtctcattcccaaataagttgtgaatgtttcgttgataatttctcgtaggtcaagggattcactaacttctactttctgcgcagctgtgtataacaaagggtcagtactatgaatctggtccctcaattgtccacaaaaagtgcttctaa

SEQ ID NO: 111 - DNA, 7693 bp, Solanum tuberosum
  source 1..7693: mol_type = genomic DNA
atacacaaataccggctactggtctttggcatcagttttttccgtctattagatctttcccaatagttaataggtatttttggctctttttataagaaaagaggtagaaaatgaaaaattacgaaattggaggactcaaacgaaaaatgtttttaacttccggtaaccggagctagtccatggccattaccaactaaaagcttcgatctttcctgattccgcaagcaaaaaaaaatctcaaagtttaagaaaagtggaatccatgattgatccagctgagtagctacaagatggataatcgaaacgttgtcgtttgcgacaacggcactggggtattctctttgttctctcttttgaattggtgttgtttgagtttagattcgatgatagaggaaattcatctgaagattgcgcaattgtcaaacgaaattgattttattaaggtcttaatacctgaaatgttacttaatatattagagaaaatgggcattaagttgaatgtgagtatatatacttccacagaagcagctaaagactccgccaagagtagaaatttctcaatttcgatgattaaatcacgatctgctaactagagttgatgtctttttttctttttgaagattacactatccctgtggcaacagatttttcatttttttttttctaaattaagtctgtcaactatgcatcaatcagaaactaatgggggtgtagtactcctctatatctatttttctagtcggacacatttcgttccagcaatttaaagtacagttttcatttatcagaagaaaaaaagttggtgtatgtctggcatgatcacattacttcattgaacttgtacatatgccgctatactgctttatattttgtataatgttggtgtgagatgaatttgaatggggaaacatggtcagtgattcatattgccgacccgaactggtttggagttgaggtgaaattgttgtagctacttttggttttatatcttttttggaactactcattcctggaaaccaaatctcagtaagtcagttttccttcacaagatgcaaactttgaattcaatttctggttatgaagatcatcatcctatcgactcaagcatgatgctattcctttcctagtggaacctgctattcagttttatgaagtgatagactgttttgtaccaagtatttgctttttttcctttatttttttttcttgtttagcatttccttttggggccagtcatggtgatatattttttgaactattttgatgtctatatggacagtaaaatggtgtgtcaattctcaatgttttcatgaactaatgcagtatgtcaagtgtggctttgcgggtgagaattttcccacatctgtatttccttgtgttgtggggaggccaatgctaagatatgaagagtcccttatggaacaagacttgaaggtaaatatctctcactttatgcttaccctacattgaaaatgtgagggttctcttgcatttatcgaaaactagtaagctcttcttagagaaagaaaatctgggttgaaacttcattagttcaacagttgcttgctaaactagatgttatagctacttcttgtgaaatgaagttttaactctattttgttttctgatacacctcaggattttttgagttctgcttacgtagtatactcctgcattctttgtttaaacttatagcttgtaactaggacatagggaatcttcccatcatcactttttttccttatgtcctcttatgtactttgctctcttttattcttatattataccattctctaatatattttgctatctaaccgttgagctccataagtgtactcacaaacttgttgacgaatgtttaactcatttacattcttcctctaggatattattgtgggagatgaatgcttgaagttgcgccatcagttggatttatcttatcccgtcaacaatggaattgtacaaaactgggatgatatggggagtgtgtgggaccatgcatttttcaatgaactgaaggtagatttctctactgctaacttccctgtgaagatttctaattggtttaaacttttgcttgctaatttttctttggaatgcttattgtatgataagttcatggttaactgacaagactttcctttcattccgctggtgaagatagatccaacagaatgcaaaattctgctgacagatccacctctcaatccatctaaaaatcgtgaaatgatggtttgtgttaatgtttactttttcgagaaaagcattccctctctttactgcttcaatgattcttaacttatactcagatttacttgaattacaggtagaaaccatgtttgagaagtacaactttgctggtgtcttcatccaaattcaagctgttctaacattgtatgctcaaggtaccattatacatgtatgagttcttggggcataatcattttcaattatctgcgagaaggaccttcgataggagtgtttagaggttgcggatttgggtagaaggttagtttggtagttgagccttctctcgcttcctgcgggataggcttggtggtcatccttggaccttccttcttaccagtagtattagcactattctcgtagtttcttgtactttgatttagtttgtgctcagattattgcattatttcattgtcattacttttctttctgcagtttgttgtgtaatgctctccatttcgcattatttcattgtagttatgctctcatatttatatccccttttttcaaactgtttggcatgctttatttaagatgagggtctatcggaaacaacctctctacatctatgggtaaggtttgcatacactctaccctcctcagaacccacttggtgggattacactgggtatgttgttgtttcgagaaggaccatcataagttttgatattgcaaatttcagcgggtatttgttacaagggtgggattaattcgatattttgcttctacttaggcccaatctggtgatggatttgctcatttttgatgttccaaatatgcaggtttgttgactgggcttgtcatcgactcaggtgatggagttacacatgttgtaagtttttcataagcatagctgtttcatgatctataatttgtctcggttgaacattgattcaaaagagtaggttaattcttatacagtttgaggtaatcaaactaggagttgctactcccaaacctagaactgttttcctgcatagtccattgggctccctgtctaataagattgccccttcaagctggtcataaaggcagtgttttttcagctatttgttcctttggtgacacacggtaatacttgctatgaaccgtggggatattttttcttctgtatgttattcagaaatatcttgatgcaggttcccgttgtagatggatactcatttcctcacctcacgaaaagaatgaatgtagctggacggcatataacgtcttatatggttgatctgctacttcggagagggtaattgccaacacatacttgaaataaactaaatagggtcattcatgctatatttgattattttaaaccattactggagttttgatggtcagtcaatatctgaaggtatgcaatgaatagaagtgccgattttgagactgtcagggatattaaagaaaagctctgctatattaggtgaattacttgagtcataaattaatccctttactacttcttctggctagtaatggtatttgcttatctgcagttatgattacaagagagaatatcagttggggcttgaaactacaattcttgttaagaattatactgtgagtaggctccatccataataagcttttaattggaaaaaacaaaggcactactattttttaagcttttctactaacttgaactggaataaggtatgatactttgctcttggaagtaaagatccttttttctcccttaagaaacttggtcattctgtaactcattatttcacttgtttttcaacagcttccagatgggagggtacttaaagttggcacagagaggttccaggcacctgaggctctttttactccagtgagcatgcattcccatttttattttcctctttcacaaatcaagaacatatctttttcgtaaaaatgcaccggatttactttcctcatagtggggaagatgaaaggcaattgatgttttcccataaagcaagctaatcctgcaaatcccatataacaccagatgtcaatgtgacacgtgttatctaataccatgaccatcttttgtcttacagcttcttaaatttggtagttcttttgctgtttaaatactattttcacctctcaactattcaataggaaagcaatagagtgttatctacaatccaatttgtttcagattaagtgtcaattaagtccttgtgaaaaattgaagcaagaacacattgtctgaactgcatggtttgaaatgctattatatgcttctccaaacttctactttatgggttgatgtttgtgaaaggaagctaaatttaaatattattccacgcttctggaaaattctaattgatgggttgatgtatgtgcaaggaagctagatttaaaatattatttgacgcttctccaaaaattttaattgatgggttgatgtatgtggaaggaagctaagtgtcactttttctgtccatttcaggatcttattgatgttgaaggtgatggcatggctgacatggtatttcgctgcatccaggagatggatattgacaacaggatgatggtacttcaactttgaaatttcttatgtattctttgccatagtgttgtcatttgcaatccatcatttgtttaatgtaataatcattacttcaaattttctcttgcagctctaccagcatattgttttgagtggtggaagtaccatgtatcctggcttacctagtcggtaacttactcaaaatactcttccttattataaagctttgagaacttggagctgagtagtgcaattgtgcatggttgattctaaatgctacattattgtcatactcttctaggaagttttaactggtgtgacagtttgctttgagtttatgaaccaaagtatatccttgattttatttttctcaggactaatgtttgatcaatctggcagagaatttgaactgtaaagctgttatgttataactttgataacactcttttattgtgcgaagaactctaattcatctccctgtcgattttgaattttctgattcccctcttgtggcatcaaaatttgctaattccctcctcctggtagcagtcagctttggtatctctgactgatgactaattcctcatagttgttctattttttgcctgttcataagtacccttctgaaattgttagtatcataactaacatgaaatgcatgaaggcatatctaaaagtgcaaattaacttgaaatgtgtactcattttcactacatactattttaactctcatcttattacgtatgataaattagaatatgaaattctattcgagagggtaggagtattgtttagaaatgtgctatattaggaaaattcaggtatacactttaatgcatgaagaattcctgttaagaatatccgtgagctgtcatcaagaaggaatatcatctctttgtgatttattcacttgaactttacttgtgcagttaacatatcctttggtttactgtgggaatataaggaacaaactctttcttacccacctcatgtccacactcatcattttcttgtttccttaaataacagttattttcccttcttttcaaacattgacagccttgagaaagaaattttggaccgctatcttgatgttgttctgaaggggaacaaagatggtttgaaggtactgtgtgactcttatttgttcttttcacgatttcttgaggtttttggtttatgaataaggtttatgcaactaagtagcatttattcgaatagtcttacccacaaaccacaataaaatacctcgaactggtacctgcagctaatggtggtttctgctctatatgaggtcaagtcaatcaagagatggagataagaaagtagttgggaaaggacgagtagggttttgcatatctaggaagttggattgcattgcctacaattgttttgtcttttattatgcatttcttggttttcttaaagtagttgaaattttctctattttatatgttttctgcaatagaaattgcgcttacgaatagaagatccaccaagaagaaagcatatggtgtatctcggtggtgcagttctggccgggattatgaaggtatggtggtatctatttcctctctgtagccccatctctgctccttcccagatcatgcatataaaagagtatttattcccaggagaaataaaaagaaagccaatctcttaagatacatccgtttctaatctgtgtacacttcccataattttctggatttgaatattctatttctgtcctccattgaagtggttgcggcacatgttggattgtactgttttgatatgatttaggcccgtgcaatcatcagcttcaggcacaaggaaatttgtgtttcacgtcagtccaatccttctctttttcttgtacttcctctgcaattgatcaaatcatctgtgtatgagagatgttcctgtggctgaatgcaacttataaagtcgtttggttggtaacaagttatcccaggattagttatcctgcgattagctatcctggcataacttattccaccatgtatatgggataacttatcccatcactatggtataaatggtgggataagttatcccaaacatggcaaccaaacaagaaacaatttttttatcccatcactatttatttttatccctcacaccaaatgaccacttagtagagcaagtaaaagaattttacgccgtaacttaaatgttttatattatgctgaaatcatagtggatggtatgtttccatgtttaaattatttttgctgtcctattcttccagatgctcattcacctagaaaaaaaaaatcattctcgtctttcttctcctcgagcattattaagtgttttttcattatgccaaaaaggaaaaggattgcaatgaatcaatgcacaccctaattgaagagcatacaatttgaaagcaacattattacgttaacagaaataaatagataatcgaataatttctgcaggatgcccctgagttttggatcaatagacaagattatttagaagagggagttgcatgcctaagcaagtgtggtcaggcatgatttttacatgtccatcaattgtttaagctttagctatcttttcaaagaaaagcttggaaatgtacagatcaagacgtgctggaaatgactctttagcattctaaaagaagctcttgtactgtattttgctaaaaaaatctcgaagagacaggacgtgtcacacttgaatgtttttactgcatctgcggtttatcttagtcgagcagaaattctttaaggcttgaatttgtacagtcgatattgaagtaaaatattgctaattggaattgctttccattcctacacttttgtgaagtgtttaaatgtgtgctgaaacataagcagcttattgtgtaatctggcgcaggcaaaagaggttgtgaactaattctcacaaatgtataacagcttgagctacattttgttaactttctatccagatattaactttatattc

SEQ ID NO: 112 - DNA, 8558 bp, Solanum tuberosum
  source 1..8558: mol_type = genomic DNA
ataatataaaaatgaagagtaaaaaagatgaaaaggggaagaaaataaaagaggtgggaatagcagcaaattgaatttacttccatcagttcttgaaatttgatttactcagagagaaagggagacaacaatttctcagagccttcaacaatggaggcagtagtagtggatgctggttctaaattgctcaaagctggtttcgctattccagatcaaactcctgctatggtattttattttattttacttttcttaactgtaaaataggaaccccatccaaaaaaaaaggttcaaatttggagttttctagttattttacctcaatttgcgtgaaagtttggagctttgtaatggttatactgtatctgttactcttttcttgaatttggttgtgtataggcaaagtataagaaaaccccatatgaaaagagctgcaagattggaactttctgctatttacttgttaattttgcctcaatttgtgtattttttttgtgggggtggggtgttatggtggtaatgatgtagttaatgttttttgtaactttgagaatgaagtacaggaaaacccatatgaatttagcttcaagattggaactttttcgctttctgctatttgctagttatttgtggattttttgtaatggtgatactgtatctgttactcttttcttgattttggttgtgtatagacaaagtacaagaataccccataagaaaagagctgcgagattggaactttctgctatttacttgttatatttgccccaatttgtgtatttttttttgtggggtggtgttggtggtggtagtggtggtggtgggggggtgggggtgtaagatggtaatgatgtagttaatgctttttgtaactttgggaatgaagtacaagaaaacaccataaggaaagagcttcaagattgaaactttctgttgtttacttgttaattgcttcaaacttgtgtagattttttgggtttttaagatggtaaacttttggaatgaagtaaaagaaaaaaccacaaggaaagagcttcaagattgaaactttctgctatttacttgttaattgctccaaacttgtgtagattttttgggtttttaagatggtaatgatgtagttaatggtttttgtaactttgggaatgaagtacaagaaaaccccacaaggaaagagcttcaagattgaaactttctgctatttacttgttaattgctccaattttgtgtgcatttttgggatttttaagatggtaatgatgtagttaatgctttctgtaactttgagaatgaagtaaaagaataaaccataaggaaagagcttcaaggttgaaactttctgctatttacttgttaattgctccaattttgtgtggattttttgggtttttaagatggtaatgatgtagttaatggtttttgtaactttgggaatgaagtacaaaaaaaccccataagaaaagagcttcaagattggaactttctggtatttacttgtttttccaatttctgtgatttttttttttgggttttaagatggtgatgaagtagttaaggctttttgtaactttgggaatgaagtacaagaaaaccccacaaggaaagagcttcaagattgaaactttctgctatttacttgttattttgccccaattttatgtgaattttttttgggttttaagatgataatgatatagttaatgctttttgtaactttgggaatgaagaacaagaaaaccttatgaggaaaaagcttcaagattggaacgttgtgtattttttgggtatttaagatggtaatggtatagttaatactttttgtaaatttgggaatgtatggtttaggtaattccaactcaaatgaaacgcattcctgaagatgatgaaggttccttgtttgaggaagaggaagtggctgtggatcccattgagagaggtttcgttaaagattgggatgcaatggaagacctgttgcatcatgttctttattctggtcttggttgggaaatcggaaatgaaggtcaaattttgttcactgacccactctgcactcccaaggtgagtttttgatattctttaaaaaacaaatcagaatttctgaaatttatttatttttggggggatagtaccaaatttccgtagaaattagtgaatggtttttgagtatgcaaactactgtagttagtaatgcacatgacaagaaaatgatttgaagaattgcatattggatgagctgtaatgtcagcttgaaaagctttactcctttgcttaggaataataactgagagagcctggaaaactcactttcaaatcctagttacaacctttagtgtaagcccatttcctccaggttggtgggcatgattagtataaccttggaaacatgtgcttgtggacgcaacatatggattagtctagatgcacacaagctggtccagaaaccatcaatattaaaattgaagaaggaatagcaactaagtgaatatgtccttggtggcattgctttctgtaattcggcatatctagttatgaagcataaacaggatcctcaaggattagtaattggcttggtcttatggggttaaagaaaagtcttgaaatatagagaaaatagtaagtcattggtgctggatgctagatttggcttttttgtttttaactgcaacatcaagttagtgtcttttctgtgtattggtatggaaatgtaatttaatatatatattgctgcctttgtgtcaacaggctgttagggaacaattggtgcagttgatgtttgaaacattcaacatctcggggttttatgcctctgagcaggcagtattgtcgctttatgcggttggacgcatatctggctgtactgttgatgttggtcatgggaaaattggtatctgcattacctttaaacttatcatccttcaacatccatgtatttgaagattctttgctttttctgtcacttagtcttccgttaccagatttagcctacttgtgtagtcactagtcattaggtagtaaacatattacatacttttgtttctatttcctttgagttgtaaagtataagtgagcagatacatgaaggcttgagaatgtgggtatcattgcagtattggtcggaaaaacttagtagtactgttggttttattagtttcgagaaacagatcagggtaattatccagtctgtggttactagggttgataatgcccctcaatgttctgcgttttcttcgtctatttatagttgagcctttttaagctgtacctactacagttaatgctgatttatgaaaaaaaaaaaatgtataaatggggcccttcaaccttgcttcagccatatccctcagggacggcaccacacatgcatccacaaaaagcactaaccttaaatatgagctctagaaaaagagaagggtatctcatgaaaggtttcaagctactggctttcctgaccgaggtaatatttacaaagaaccagtacctgggatggtttatcactttgcttagaggtattagggggcatgtgggtaggtgcaatctccattgatgagaagcatatccacaagaagagtgtaaagaaagatatcaatggttgtagaagcctgattttagctctagtcgactggatgtgcacaagtaaaatattgagaactgcagctaacaagttgtcttgaagacaaaaagaggcgatacctcatttcttcctgttcaatgcacatgtccaccttgtgtttccaccttctttggccatgttcaccactattgccccagatttttttttctcgacatatattcaagagaagagtgtgttctggtggacagcacatctgtacagaacatgataattctcatgaccttgaatactttctattcgtcttcttgcatcttaaaaagttggatctggtcttctacaaggtggatattagcttgcaatgttgtaatatcactgttgcatatatatgctacatattccttcttataattagagacttcatcatttgagtttagaagtattgtaatatgagagctcattgtaacacaattttgcttttgagaaaatttgagcagtaggataaatatctttagcactcatcactactaagggttggtacccttttgatgcttacattttaaaaataaatgggcagaaagaaaagaatctcttagcctctattcatatggaatgggcagaccaatgatgctttcttttcttgcctcagatcaaggaactgtgagaattgatttcgctctagttgctatcagaaatatgacttttgcctattttgctataatgaatattcaagttttttttcgtgtgcttcttttcttctaaagttaaactgtttgtattctgttttggaaatgttgctttaattttccttgttttttctctgatctgtgttgatttctcagagttcttccggttgtcttttttatgaccttttagatattgcacctgtcattgagggtgctgttcagcacatagcatcaagaaggttggaagttgggggtttggatttgacaaagctactagcagatgagcttagtaaatcaaatcccacagtgaaactcaatatttctgatgttgaaaaattgaaagagcagtatgcatgctgtgctgatgatgatattgcctatgagaagcttcaacactcatgcctggaagagaaacatactctgcctgatggccaggtttttgtgcactacatttcagcttacaaggcaccattatatgaagttgatagaaaaccagttggttgtattttaatacatctttaatttctagaacttattctagtttcttaaggtaaacataagctttttttttcaaactgctgaaagaaatccttcatttgatttctctaaaggacattgtggtgtagaacaagccagtgcattactgcctttgaactctcgtttctaattatcttgttccagtaaagaggcttaaaacctccatttgtgagttcttctggtgacccattatggggttgaagactgatctgattttaacattgctaggattgatgtctttcgctgcccttttatgaggtcggagactgatttgattttaaaaattatacgaattgatcttagatattttctctgcttctttctgtggaatagcataagtcatccagttagggttccaaagagtgctgccatgtgcaatactcattttcaggatagaagggaattgaaggaacaagggaagcctatacaggaaagttagaaaagattgagaaaatggggtcttaccatcaatgtgaacgatgatccttgaatattagagaactacatagatatcttaagatagaaactaaaggctgagctttttgcattccactaaacatcttacattaatagcagtaaggggagttgtattttaagatcattgtttattccagtttagtggttttgataaaaaaagttcttgcaggctttcatttattgtcgttatgtcatccttatctagcatgtagaactgtttatgcctgaatgaatctcatttcattttttgtgatttaggtaatcacaattggaaaagaaagatacactgttggagaggcattgtttcaaccatctatattgggtaatgatactcatggaatagttgagcagcttgttcatagtatttcgtctgtgtcatctgaaaatcatcgccagctgctagagaacacagtactttgtggtggcactgctactttaaccggtcagttttgttcatctctttgtttagtagaatatgattgacaaatgctcatgttttcctgtatttcttcgggtctattactaaaacttttcttcttgtttggactttggttggttttatctcaaatagttcaattttattgtatgtatttgaaatgcttttattactgacagtccttttctcattcaaattaatgcaactaggaagtgtactattcctttttaatgttccgctattggtattttgtttggcaagctttcaatatttatctactgatacatttgagattggcttgcttttcttttcctctttaaaccctttgccaagcatagtgtaggtggatagtcatcctcaaattctccgatgccttagccttcttttatgtagattatcccgatagcatttctttctatgcttgtaaagtttgggtggggtgggggatgatattaagtattttcccatcaaattgcctaagcgctatgacaatcttgtcagtgaatttcactatagaaaatctactggcccaaatccaatccattggatgtgaatgtatttccactattccttgggagactagaagaggtctggtgagccgatatttagctgttggaccataagtaacacacatcaacaagaatccttcactgaattggcttgtgctttaaatgcttgatggctacagcaactgtttgactaacaccgagtgaaacattaaggaagtgtcaatatctcccttcctcttctcctaactaggaactttgtctattcctgtaatattcttcatcaatgccaacatcgtgatgacaaaacaaaatattgaaatgctaatgagtgccgttgatcagaggggccatttctcccctttgattggtaatattttctccaaggtccaggacacaaatctgcttgtgatcttactatcttctcttaccaaactggtttagatttatagcttgcacattaaaatgacccaaatgactagcgggaagagctgatcgacttgtttatgagttagcattggtaagtcccaaaatggatagcttagaggtcgagacacaggagtctcaactccaacactaaggggtcgtttggttgggaactagttatcccaggattaactatcctgggataacttatcccaccatgtatatgggataacttatcccatcactatgctataaatggtgggataagttattccaaacatgtcaaccaaacaagacatctaaattttatcccacccaggactatttattcttatccctcacaccaaacgagccctaagtgagaacctatatgcttcatccttggtgggataggtttgcatcgacacttgtgtttttggtctgtgaaagactgctaattgtatcagtcaaggagtgtgcaaggttgtctaattaacaaattagaaagagctggttttataaaataataaataacatagctatatcagtgtagtatacttttatcaataacaacaagaacacaacaacaataattgtaacttgaggtagatcagtttggagcatcacattgaagagaagtaaaatttgttcctcctccccatcactaattaagctaacatatatcacaaatgagtgtaaggtgaagaggggaatggatcgagagaccctcaatcagtcagttggcatggatggattggtcatgctcaaattgcctccttccttctgaagtttgcactggccatttgtaaagtctagactctggtgttccttgggtcttgcgggctaacatacatgtgaatgaaacttgtatatggtggagcgtttggagagaaatgctaggtgctttgaagacgaacacattacagaagattgctacgtgtcttttaatttgtggtataaagaacttttttgtagttgaaacagagtcaatattacagttgttagagtccttgtaagtagaccaggatagataactctttggatctttgtaaatttggctaccagcatagcatttgtgctgatgaatataaattaaactttgtgttgcttgtggttgcagggtttgaggaacggtttcagagagaagcaaccctttgctcatcagcagttcgtccttcgctagtaaaggtatctttcttgtaaatgacagcttaggttctttttgcctctttgccatatttgtgccccttgtcacaataccctaccgctttcatctttccatcataaaagcgacttaggattgtcagcccaagtctttgtgagaactcccaacttagaggaaaatggattgattttgtttttaataaccgagaaatctgtctggagccaaccaccactcctctccatttaaatactagacttagttagcttagcacaaggctcgaacttgtaacctatgatacaagtccctcaaccaatagagaggctgtgctaagaagagcatcctaacacgagagaaggtagtgttaggatgctcttcccgaaacatgaactacctcgttacttctctaattgatcacgatgccataacctacttatagaattttgattttgtgatattctttacagcctccagaatatatgccagagaacttgacttcatattcagcatggattggtggtgctatacttgccaaagttgtcttccctcaaaaccagcacataaccaaagctgattacgacgagagtggaccttctgttgttcatcgaaaatgcttttaaatacaacaagttctttcttagtttaaacgagagtggtaggtatcaatgagcacccttaatcaaaggtctcggatttaatctttataattgaaacctgtggattttactcagtggattctgaatttgctatctagtcaaatgttttcttttttcctgtcaaa

SEQ ID NO: 113 - DNA, 17117 bp, Solanum tuberosum
  source 1..17117: mol_type = genomic DNA
ccaagaaaagccctcgtagcgaagaatttctgagaagcagcaaaacacgaagaagaaagagttaaatcactctccgaaatcgaatcatgtacggtggtggtgagtatcagttactcagtctctctttgtgtgtcaaagtttagggctttcatgttgaatttagcgtttttttgtttgtttgtgtgtgtacagatgaagtgtcagcaattgtgatagatttgggtagccatacttgcaaagcgggttacgctggtgaagatgctcccaaagccgttttcccatcggtaagttaaaccgtttttaaccttgttagcttgcaaatttactaacattttcatgttaagcgtctaacttcccaagcaccagcattttaatagctaattcgagtcgagttacctcgaaaagaaagtataagtagcgtgttataactgcagtgataatgtgaaaaacttttacactcacagtgtttgtaacacgaaatatgactggatgttttggttttgtttaagacgaaacctctaaagtttagagcttttggtcataggctgcattcttgagcctctatgatgtttaatatgcaattgaggtaacagtgtagggtgtgtcattagatgaaatggcctaacccttaacatcagcctactgccactagattttttccttttgtattggggatttaaagatttttatcatacatcatcagttcttttttaattatttcttgaacaaattagaattgtttgaagggaaactcatcaatgagaccaataaaaaaactgaaattgggagatttttcttgttaaaattgataaaaaaaatattggcgtgtaatttgaggaaatagataactgtacattgaattctcatctacatagtggggaaacttgaggactattagactcatgggtttgagaatcctctttagtgtgcgatggtcatcttttgtgtgcatagattctggtcatgtggtggattgcttaataattactcctgccgtctcatattagtggatcattatactaaaaatagttgtcccatattagttgtccaccttactaaataaaaaaaatcattaattaatttttttctgtattacccttgcaattaattctttttatagtgttcccatttgtttgtaaaattcccaagaattttttaaggggtgaattagtaaaattatctttttatttatgatttcttaagtattgtgcaaaatgaaaagtgatcaactaatatggggcagagggagtgttacagtagctgtaagctctttgtcaggtccttgagcactgtcttcaaacaattgtgcctcttactttttccaggttgagttgctgttcgatatgatttgggaattcgttacctgtgatggatttacatggagtcttttattacttttaatttccaactgtatgttattaccatgaaaccacaattgttaaagattgttctgcaaggtcttgcagctctaacatccaagaaagctaaaggtgcagtcgaatgactaccgaaatatacttctcttccatactcacaaaaaaaagaaaagggaaaaagaattacttctcttgctcatctcagaaccagaaaatttaaatgatgctcccacatatttgtgcaaccatttcaatgtttcactttcagaaagtggataaaatatagttggtgtatttattatattgcttgtacctggtgctgtgaatgttggttcaacgatggaagtccttgattgcactgaaggatgtggtctgcggttaatgaagttagaatggcccatgagagaccagggttcaaatcccaacaaaaaaggtggatgataccatcaaaccttggtgatagaattatcacgtatatgtgttggtggaaggtatttagtaaccgttagattaattttgaagatggtaaggacaccaccgttaccacaaaaaagaagaagagagaagaaagaagaaagaagaaagaagaaagaagaaagaagaaagaagaaagaagaaagaagaaagaagaaagaagaaagaagaaagaagaaagaagaaagaagaaagaagaaagaagaaagaagaaagaagaaagaagaaagaagaaagaagaaagaagaaagaagaaagaagaaagaagaaagaagaaagaagaaagaagaaagaagaaagaagaaagaagaaagaagaaagaagaaagaagatagaagtccccaatttcctacttagtcttgaacaataaaatttatagctgatgcagcgaaaagtttccctggaattatatacataagatagctgccgagtttatcacaaagaagaaggagaagaagaaggagaagaagaaggaggatagctgctgagataattagcaagatctctccggttattctccttgttagatgaatcaaatatctagtatctctcgtcttctcaggatcagttcaaatcctttcctcattatggttgacatgtgaattcttaaaatatcattagcaagtcagctgctcacaaactaacctgccttgattgtgaatgtctttatcactatgctattccttcatgtatacttatattttgcttctttttaactagtcacctacatgtatgtttttgtgtaagttgtctttgattttatgatcttttaaaaggctgttggatcggttgatgaaatggaagttgataaccctgataatccggaggataattctggatctactcctgaccttaaatcaaagggtaagcggaaattgtatgtgggatctcaagccttgggatttcgccgtgatcacatggaggtcagttttacaaatttatctagtaccatctcgagatgccatttccttatctttgttatctaatatgttggattgtcatgtcaggtgatatcacccatcagggatgggacggttgtggactgggatattgtagaaaacatatgggaccatgcttttaggtaattggtccttccttttgttcatatgctgaaacaattcccttcttccattaactttttgttgtgtcatgggaagaatgttactctacatattttcagctcaggtaagtggggatatgctttgctctgcttatgctgcatagttgttctatatgtgtcttgtcctcctctcttagtatggaagtatcttagaaaccctcactgatggatcttaacatcttaaggtggtgatatgctgctgatcttgttgccctggcagtctgcacacatgctctctgattgccgtgtcctgtgaaacatattttagaatattgtgtgaggcagacaaaatctaaacgattttctttttaatctcatttgggttagttgatattggtctatttcacaatttccccgatagctgaaaggtagttttaagcaattgacagcatcaaggacatggtagagtttgttgcagggttgtgttgagcaagtatttctaatgcccccagaccacagaccaccattagccaatattgggcattcttcgttttggttttactacatggattactgcagtgtcctcttgcattaaatgttgttcgaacctttcgattactgctgggttggtgattcgaacatgacactggtacaggtgtgaggttcgtaccagatcttatcaacattcggtggataatttgaccaaggaaaggtgaatagagaaccgaagaaggcagagatgaagcacaaaggagaagaggaagaagacagaaggaatagatgtgacaacaaggaacagtaattcgatgagcttcacgatgtgtgtctgtaatttttcttcttcttcgaagtaggacaaaaagatctaaaattttaggtatttaaaccaccattcaactaaaacaggggactgacacacttggactaccttctggggaagccaccactgaactcaaaggaggaaatgccttagggtatctttgccaattattggtgggcttggttttaagagaagtgcccaggcaaaaatattgtgatttaattggaccacaaagatagttcattatatatttaaggacaagatctataagaacaagattaattgggaattctcaaaataaaaaaaaacgaacaagattaattgactaacttggagatgggtagaggggcaggccattattcattgagttttgaactgtgtttctgctggtccttggggatttctcagttataaaataaataaattgtgttaactttggatcatttgacacaacaaaatatttaacataacttaataattaccaaaaatggattttagctaaaatttatcttaagagtgagttacttttctatgttagaaattattaattgttttatatattatgtttttaatatagatccgtatagctgatatctactagttgggaataagcttgagtcttgttgaaacctacactctagaacctcttttacctgtgtcagacacttgcatatctacccattgcatctagatttgtagccatgtagtctttgcgcgattgctcttatattaatgtaaataatgtcatattagtgattcatcctaaaaaggaaacacaattatgctacatactgcttgcactctatttttgaagatcagactacaatgttctttttcggagaattgtaacaagttattatataaaggtagaccacacaagctgtgaagtcacccaaaacagtgtgagttatagttagagttcctagatctaagccttcctacacgtaatctagaacatcaaaaattgactctgattcctctatgtattcttgtttacaccaaaattatgaaggtctaaacggttgatcttcaacttctggatagtacttcgtttgtcttcaaaacatctctgattcctctctgttcaccaactgcatgctgggacaatcctccatctctctttttgacttctttgatcactgaaatacctgctttatgtgaagagatgtggtattactgattcatttgaagaaagggaaaaaaaagtcttccttatacgcttttcttgtgttacttttttttcttttttcctgtcatttggttaagttgatgctgctctagactattgaaaaagaccttttttttttctgctgcttacattcacttgcagggaatgcttactgatcgatccaaaggagcatccaatgttacttgcagagccttgttcaaacactcagcagcagagggaaaagtgagcaatgcaatctgtctcttagcagtcttattacttcacattaaatcatgtcatttatcttttgggcattgtataacaattgggtacatgatttcaagctttattattcctgaatatgcggcctttttctgcctattttgtgtcttatgttaatttataggagaacacagcttttttcggaggacgataaaaatataagatgaaagcacatccttaagtaaagtttacatatttatcaatcctgtaggcccatgtcttttcaatttcaaaggggaaaagtatgaacattctaatagcttcctttcatataaaagccattaacaaaccaacaagggtggtggtggactggtaagtactccttcatccttaaccaagaggtctcgggttcgagtctccttgggtatagagtcgcctttattagggagcactttacccccctccccaatgtgggacttcccgacacgaatctgaatttagtcgggctccaatgtgggtaccggagaggcggagaccgggtgggaaaccaaaaaaagaagtcattaacaccaaaaagtttgttagtttgatgtgaaaacagtatatatccaattaaactaagtaataaggtgatcggtacttttataattgatgaatgctaaaagtgcagctatttgtgatgaatatggacctagagctccgataccagtgatgtagcactagaaattgggtagggtgaaagagaaagggaaaatatgagaaaagagaggagagaagaacagtgagagtagaataaaacagaaatagagtgagaagagtccacaaaagagagattttacaagcagttcatctgtaaaatatcttttgactagagcgattcttgtgcccatgcttgagcaatttggacctctcaaaatagttctctaagctatcttccctattaaagaacaaatctaggtcaagtttccatcaaatttatgtccatccatcttgattttttttataaggtcattgtggtcctcatagatggtggatttctcaaacataagatgtcacttattagggacttgcctggaattcatattcgtggtggtctgctaagttatgattgtcaactactgactgatttactgatcaactgttcgtttgccacagaatggatcccaagtgtcaatataaaagccttaccttgtttaatttgtaataccttctagaaaaaaaaagtaataccttctagaatcagtcgagtccaaggaattactttccttaacaagaagtgtctactgtgaaagaaattgtccatcatgaaccaaaaaaaggaggaaaggcagtctggtgcttgcactattatgtcatctgtatgcaaaatgaaaattacagtggactgatgatcatctatttaacagggctgcagagataatgtttgaaaaataccaagttccagcattgtttttggccaaaaatgctgtaagtgcctttacccactttgaatctttaatttgtagcgtcttaaacataaccttctttgtgctatttagtaatggaactttcacttttgattcaagaataaagaaaaaataataaaaaaagctgttgcttcttaacgttacaagatcattccactctagttgttaattttctcatggtactgttaatgctaggttctcacatctttcgcatcaggacgtgcaacttctttggttgttgacaggtaggatgttatgttctacttactggctatccttttgaattacttatttgacttgtcttgtcaataattagctcaagtggcaaaaggtggaggatttgtggcttaggtcgcaggttcaagccccacaccatgcaaagcgaagcccggtatttaagtggagaagggtagaggggcgggcccattatccaccgagtttagaaggctgtgattggtccaaagggcgggtcacagacggatttctcggttatcaaaaaaaaaataaaaaaatatctagtctcttagccataatatcatttatattatctgcatcgctttgtaccttcccttcaagtgggatatgaaaaattggaaacttcatgacttctggtgcatgatggcatcttaatctcagtttcttttcaccttgaatagttaagtttctatacatttacatctgtagcagtctaaatttgattcataactgtatgatgttcgatgagcgaatggtgaaaatgagaggttttcaagtaggctagcatcttattcgtgaagaattatgtttgagaatatggagatatgatatcaatctttgcaatcagtattaagaatatgtgataatgtgaattatagaaatgctataatgctctagcttagattaggtggatactattctgtattgttattctctttcaatctccactattgcttagtacacctgtaatacccttccatttcaatcatctttttttaattctagtatgtgatgtcttctgtttcttgagaatgtaccagttttgtatatttaagcaaaagaacacaggttgtgctgaaaccatatttccattggggaaaaaggaacaaaaacctaggatattaatgattgaagcagtgtcttctatgtagttctgtttacaccaaaaccaaaaagtttattgcagttctacttggtcctctgtagtctgtactgagttgcaactatcttcaaaacatctggaattcttctttccaaattgtccatcatatacaagttgggataagcctccatctctctctctctctctctctgaagttcctgcttttgcctcttcccagccaaacaagacttcaattatttttcttggcattgtccgggcaatgctctgagactaatggagatcttccatagcatgtctgccgtcctgcattttaggaatagatgctgactgtctcagcttctttggataaatctctctcctactaaggttgtctttcataactgctttcttagctaataaccagctaaaatatgcaaccttaaaaggtataccctaaagagtcttgttgccaccataatgtgtttccatttgtactcatctaactgcttgtaaaattctactaatgtagccacttcccaatcatttagattccttctgaactatgtattccatccttgaggagaccgtgcttcttttactgtcttctgttgttttagtccaggaaaatgttctttgaggcaagttttacccaaccagttatcctcccaaaaagacgttttgcacccattttacatcctgataatagagtgatccctcactagtggcctaagtgttcttatagatctccacaaactctatccataaggcgagtgcactttctttgagatccacctgttatcttcaccatattcactttgataatacctcctagtaaacttggggttcatgggagcatctccatagccatttaattttgagtgccttgctgtataactttagtttcctagtgcttaacaagccctgcctcctccaaagtagaacattgctccacttgactctgtaaaaaatctttttatccttattaccttgtcatataataaggctattcttccttaattacaatgattacaatgattttgttgtacaagaacaagggtgacattcacaattgctacaactataggggtattaagctgctaagccacattatgaagatttgagaaggggtggtggagataagggcgaggagggatgcgactcttttcgagaataagctcgatttaatgttgggactctcagctacataagccattcatctcttaagaagactagtggagtaagatagagagaggaaggacttacacatggtgttcatcgacctagaaaaggcttacgacaaagttaaaaggaattctatggagatgcttggaggctaggggtgaacttgtgatgtactgtaggacaatcaaggacatgtatgatggaactaagactcgtgtaaagacaataggaagagactcagagcacttccctattttgatagggttgcaccacctaatagacaagttctacaaagtagtggttagacctgttatgttgtatggggcggagtgttggctagtagtgatctttacgttcaaaagatggaagttgtagaaatgaggatcttgcaatggatgcgtgggcatactaggagagatgagattagaaatgaggatatttgagacaaggtgggagcgacttcggtgaggacaagaagcagaaagagaaactgagataattcgggcatgtaaagaggagatgtacggatgtccaagtgtggaggtgtgagaggttggctatgaatggtttcaagagaggtagggatagattgaagaagtagtggggaggagctgatagacaagacatgacacaattttggcttatcaaggacatgaggtaggaggttgtggagggcacatattagggtaggaagttattaggtaatagtgcgctgtcttgctatttgtccatattagtagtcgtagtattgctattgtagtttcttgtcttccaatttttgttaccacatgttttttatacttcgattatcgtattattttgttgtagttattgttcagaatgctttggtatgctttcactcctttgtttattctttttctggactactttgaattgtattttcttgagccgtaggtctatcgtaaataacctgtctacctctgtggtaggcgtaaggtctgcatacaccataccctttccaaaaccttactctgtgggactagactgggtatgttgttactgttatcaattgttcactcgaaccaagagaataacattttggagatccacacattggtgcatggtagaaacttcaattatattcgtagacttgggctgacataggtaaatgatgccttgaaaaatatgaggattagaaaaacttgttcccgtggggatctggaagtgcttggagaggctggtgtagaatgatctggtagctttgttccaacttataagatctagatatattcaaaggtgtgtaagctatcttgacattaaaatcataattcagacaatgttactctagaaagaatgatagagcgcagacataggaaccatccattcaatcaactacgcatcaaatgtccaatcatggacacaaaattaaagcgaattttatcaaataacatttaagggtatggcctagtggtcaataaagtgggtacaaaccttcgaaaccagggttcaaattccagcagagacaaaaacaataggtgatttcttcccatctaccttaaacttggtgggcaaagtcatccggttggagatagcagatacccaatgaaatactctagaaggaaaaagttatctggtttagaatacagtgttctacacttttattacccaatgaaatactctagaggaaaaaagttatctggtttagaatacagtgttctacacttctattaaattgttaaagaatgtttggcatttttctatggccttggatctgggcacagttctcttttcaagttgcatctgtttctatttaggaaacggaatgcattgtctgttctcatctgtttacctccccccccccacccaccggctaacttttataaatcagttttttcttgcattttttctttgttgtttattgagcattactaaagagatgtctgaactaattggttcagtggtggaggattgactactgttgctccggttcatgatggatacgttcttcaaaaggtatctcttaacaaagaacaactacttaaatgtgttattgcccctttttttcttttgcttttctgactgttagaatttgactggtcaaaagagatcaacgtaggagggggttttaccttgtgcgcacccaaagggtagcagctgcgggtttcccttgtcataaaaaagagatcaacggatgatcatttttacctattttgttgatctattgtaagatagctacttccagtttgcagtaatatgacctctttcagtttcttccttttggaaattataaagtttatttcctagcattagcagacttccacttaacactgtagagatctcccattaatgtttgtatatctgacatgcttcagtaaattgtttaattgctctgaagcaaattatttcgtttcggaatctgctaatcgttccccctcactgtcaaaactcaaaaaaaaagagaagaaaaaataggaaggaaagaagcaaatgcctatgatatctttttgtacttccccatggtaagcaccgagggcctcaagttgtagctcactagaatttctttgagagaactgacattttgggttggcactttcccctcgaatagaagttttaagcaactattcattcatagaattttcctactttttcccctagattttaagctagattgaagaagaaatcaagtccaggacatgcattctaaggtggaaaatccgacttatttttatgaggattgatcaaatctattttaggtgttgaaggggccaggcctctctagatgaaaatataagatgtattttttttgtctatgggaggtagaaggagaaaaagggtttcatgttcaggttcattagcccttctctttgcttggggaggcagggtctaagctgctcacgaacttgtaaaatccgttttatttgggtaaggaagggaaaagtgaagtggttatggatgttaaatcttcaccagatgttctgtgcattgtttccaacttctcaaagttctgttttggttgtagtctctggtgcaacaatactactgcatgttttagagctggaggctgtattttactttctcagttctttccttacattgtaaagttctcttttgatgtacctttgccccagcatttccttaatgctggttgttttacgtcaataatattcctttattactcataaaaaagttctgttttggtttaattgaatagatatgttataattctttaatttgataacaggcggtttgtacatctcctattgggggaggaatccttactgactgcttgataaaaagtttggaacagaaaggcattacggttagatatttattgttagttatccttaagacttgtttgaatacaaacccttcggggtggcccagtggtttgtgcttgggacttccatgttggaggtctcaagttcgaaaccccttgctagcgaaagcaaggggtttgccttctgggtcgagctcgtcgcaccaggcttgcctagtgcggtttacctctcctatgtggtttgcgagctattgcataggagcgggggttttaccctgtgcgcacccaaagggtagcggctgcgggttttccttgtcatcaaaaaaaaaaaaagacttgtttgaatacaatgatccactctgtcttgaaacaaactttttctttccttttcctgtttatttctagataaaacctaggtattcattcaagcggaaggagatccgtccaggagaatttcaggtaacacatccttgcttcagtgctataaccagtctaattgtttaatccttcacataaattgcaagtttagcactttcaagtattcaggcttatgtttctttgtaactttttctttttcaatacaagaaaaaaaggagaaccagattacaacatagccagtgagaacctgattgtgacttaaaataaatttgtgctcaactttcgtcttacatcaaagatattgtacttgggtgtcattgctttctcctgcatcaagtttttcttgctcaaaactttcatgctttgtttctgaagagttcattctgtttgcattgaacatagacataatggttcttctttagccagtcgcatcaaatgggaggcatcatagaaagccttattttgtcattggcaaataggcaattagtttctgatttgcatggtctgctagcacttttgtgcttaatgcctttaatcttgtgatgttttgatagatttgttgctgatatttatgatttgtttcacagacggtggaccttgatttccctgatacaacagagagttacaagctatattgtcaggttaattattcttagcatttctttcttcagttgttatttctctcagcttctcagtattgttctattttgcagagagcgattgccagtgacataaaagaatgcgtctcccgagccccagatactccatatgatggtttctttctcctctcagctatttttttttatctccccccaatgtaggagaaatttacaggcaatgaaatcttgatccaagtgtagtgaaaggagatgatccctgaagatattgctaactctctataatgtgttgttgactgacatgaaagacttgtctcttctgtaatccctggatcagctattatacccttatctaaaaggaaatagaaaaagaaaaagtgaaaaaagtaacttcctcatagaataaaatgtcactgatatcttttggccagtcttaagaccttttgagtatatattcttgctcatgatgacagttaagattgcttcaagtcctaatgacacttgattcttgtatctgttcacttttttaattttttttttattctatatgaagtatgtttgttttgaagtttgaaaatattatgctgcttctctctttcgtgcagacagttcatattcgaacattccaacgacatcttatgagctacctgatgggcagtaagtgttgtactcttgctctgtttctattagcgaatgagtgattcagtttccttgaaatctttggttgaagatctaaatgcaaaaactgaaaacagtttcatttagtagttcgtaatgttagtctttttttgtatgaactcgaagccttattttagtaatttttctgtccaagattattcggcttcatctgttcagacttcagagttactgctgtgtcctattttgattaacctatatgccttatcaaaacatacagaccaccttccttaattggcaaagtccatcatttgaaacagtgtcatactaacttaagatagaattactttataagtcgatattttttttgaatttgacgcaacaatacttctcatattacttaaatatctagcgacctcatatctacttcatcaaaaaaataaaatatctagcgacctcatatcatatataggaactcattactgttctcttactcattgcattaggtcaatgagattttgggggtggggggtagggtggcattccttactatggttaacattttgttgctttatgacacaggacgatagaagtcggagcggatagattcaagattcctgatattctattcaatccatcattggttcaggttggtgttgctttagtcttccaaatccaggtttcttgttcagtttgcctatcttatgcgagtaggatggatgtgtactgttgtttgtacacactttcatcttgttctttccaggattctgtattgttaggtttatcctaagatgttgtatctgtagtgcttcttgctttgcctcccttctgttgttgtatttgttgctttttatgtattgatcctccggaagtagggtgtgcttatagctgaagcactcgttggtatgatctgtaaactgggttttttccattgcaatggatgagaactatattttaaggattattttgatagtaaatgaggtttatggacttcgctgtgctgatttgcatacctccagtattgttcacacattttggtttgacattaccttttcaaagtagcatctcatttccttgtatttcaaatgttcactgaaaagtttataataattagatcacactatagtgggatgtttctagggtgaactttatgttccatgacccctccaccttgagattcagattatttgttccattgccgaagatagagatatccatctgtaatgacttctgataaaatatttcttgtgttttttttttctgtatactatcatatgttttcaaatgcagtaatgttctgtctgcttaaaaatacctgttattcggagaatctgtcctctgccatctcaagctagctccttcaggtccttcatatatctagtctttaatttggtattttccttactgatgtcacagactattcccggtatggaaagttttgctgaaactgctgcttcccttcgtggtctaccacaaatggttggtcctttctctctcaaatttgtccgtatagataaaatatcggttaaggacatgagtccttcaaaatgttcttctttcgccttctctttttttttttttcaattagtaattgtactcaaaacttttcaggttatagatagcataaacaagtgcgatgtggatattcgaagagagctttttagcagtatattggtaaagccatcagcatttcttgcaatctatttaaagatgaggcatcaattcctttttttgtgtgcttcccttcttttcctttgttgtttacattgaaatacttgttaagtcacctgacaaagtaaattcatttaaatcctcattttcacattgtatgcactgaaactgagaggatgcttccttcaggagaagagtatggaaactgcatgactaagtgactttaattttaaaactggactgatgctccttatgccatagtacataaagaatactatgtgaagaataacaatatgaaagttcaaaataggagattagaaccaatattcaaatttatcactggattaattaacttcggtcatgtacccactacgagcatatgaatttcctaagacttattttattttgtctatttgagtttgaaactttagatgagatgttagtttgactacactgtccactacagcttgctgggggaacatcatcgatgcaacaacttaaagaacgtctggagaaggacttgctagaggtgccgtttcccttttgaatcttaaccatgccctctccctcattcatgcacgtaattgtgttcaaggatagcattctcattttatctccttagcttgaatagcctaagtctgtatcttgtatgctcttcttccaggagtctcctcaggcagcgagagtcaaagtactggctagtggaaatgctacagaaaggagattcaggttaaattattactctgtagttctctttactgtttctcagtttctcttcatggtaatagttccttttgatgttgagtgtatgaagtgtgttttgtactcttctcatctggatgtaacaacattcacggactgggttggacttctccccatatttgttacttctaagtttaagctgacaacattatgcgagagtacaatttcaagtatcttgttttttggtctcccttgcccttaccccatttaattgcagagttgagaaagcagtaaacatacttccatatattttatccgcttttactacatacaaccttgaaatggtaatttgatgaagatatacgacataaatgatgggttcttgcatttagcaatggggagaagctttcttcacacgagtgaactaacaagttattgtgcagtgtttggatagggggcagcatattggcatctcttggttcctttcaacaaatgtggttttcaaagtccgagtaagttttacatctctctcttaggcttgaatacaatactacacttgttttgtatcctttaaagtagcacccgcgaaatccgctataactgtagttttctcttagtgagtacaccttttggtttatgctaatgacaggtacgaagaacatggggcatcttacgttcaaagaaaatgcccttaagaaagacgatttagctgttatattctgcggataacactctatttattgaactagcatcaaagaaagaagactgttttcccagacttacgtgctcagttcatgtcttgtattattaggaatctgtatcagtggataccgttattttgcaatgcactatgtacatccatatcgaactagcatcgatgtcttgacgtaatataaatcagcgacttgctatttaagctttttagtgaaaatgctagatttaactccctacaaacaatgacgaaaggaatatgtgctaattgataagtaccttgtttgacaattaagtggacgaaactcctttttgttt

SEQ ID NO: 114 - DNA, 9846 bp, Solanum tuberosum
  source 1..9846: mol_type = genomic DNA
tttggggaggtgacccgcggtacgacagcagaccaaagacacaaaacgtcggggggtctgaaagctgaattgtttgattgctaagaaacgaatcgaaaacacccaatagacagtgagaccaaagctataattgagtatagagtataatagtgatcaactgtttgatgaatattcctaagtactctctttactgctacttcaattcttgtcacctttctcattgaaatggatggattatatctttcacccacctccattatcatcttctttttagtattgcatttgtcgccacccctttctttgtttcaacaaccatgataatggaccctgctacctctcgccctgctctagtcattgataatggaactgggtatgcgttgaatcattggttcttttatctgctcaccaactgtttgatgaaattccttaatgatgtttatttatgttttcaggtatactaaattgggttttgctggaaatgttgaaccaagttttattttaccgacggtggttgctgttaatgagtcgtttctgaatcagactcgagctacgactaagaacagcaactggctagcgcagcatagtgcaggggttatggcggatctggatttttttattggggaagaggcattgactagatctaaatctagtaatacttataatcttagttatcctattaaacatggtcaagttgataattgggatgctatggagcgtttttggcagcaatgtatatttaattatcttcgttgtgaccctgaggatcactattttttattgactgaaagccccatgactgcaccagaaagtcgagaatataccggtgagattatgtttgagactttcaatataccggggctttatattgctgtgcagccggtgcttgctttggcggctgggtatacaacatctaaggttagtagcttatgtgtttgaaagttccgctagtatacatttccacataatactttggttgcagggcaccttaaccaacagaaataaccttataagttaatagcttttccaagtaatttggatcttttaatatgtaaggggttacaagaaggagctgttttgtgttaaagatgataaaaaatggattttatttgtacattaggagcactaatttacacattatttatgactggccttgcttcatctgtaaaagagtaacatatgcagctgtgtctgctttattaccaaaagttcattatgtttctgaaatttagacttatttttgcttagctaaagagtagcttgataacatagtaagtgcaccagagcaggaaactctctttctttcttaggggagattggttttatggccaatgacaaatgttcttttacttatattgtcattttcataggagattggtaaataaaacacgagatctttgtaggtagtgtcattttcttctattcaaattgtaattggtcatagacttgtaggaattcgtttcctcctttattagtcataacaattgttgtcttgtaggtgacaatttgctttgaccagttaaataaaaataagagcacgagttgatataatatggaatatagtatggcagctcttatttgcactttatccgggaaatgatacaatcagtagtccattggtaggctgatctatgcttacttacaacattattaattgattatgatacggaatgttatagattctgacttaagtcgtcttttaccgaatatctctacctctgttgtgggatgaagtttagcagccaggatagatggttatctcttactttcagtatgagtgtttgcattttgttaatgtcttttagtgcaagtacaattagagtgggtaagatagagctcgtcaaacatgccaaggtcctactcatctgtgagggttgtgccaatgctctaaaatgcagatgaaacttacttatatttatgataataaccttagagtgcaccatgttcattttattttgcttttttctggcattctacccatttaacttattttcatggaatttagatcattcgcctttggataactaagtgttatgcctgctataaatgttccttaggaagattgggcaagaactgtaaaagcaagttgtatattctatttatatggataccataaactgtatgaaaacaattaaaaaccaaagaatcaagacatgaggaagggataacaaaagaactagaaaagaagaagaaagaaatggagagttaagagtttctggtcagcacaatcttggtgctgtttaattaataaattttgcctttctgacaaaagtattactgagcaatgcttgccggcaggaagtgacctatcgagccttagggaaaattgagtaacagaagaaaaagaactaaagcaaagtaaactaaaaaaagaagataaaaagggtagattaatgggttggggaaatggagagggggagaagcaagatagaaggggaaaattcaggatatatttctggtaagatgactaatgccaagatataaaccctggtcaatcaagttcaaggaaaaggtgaaggtagtgaaagagttcaactatcttttattagggatgttgttggttcggttcatccggtttgttcaagaaatttataccatatcattttcggttactctattgtgtattactaaagttagacttttcgaaaatgtgccaatcatctcaatttctctttgatatcgatacgattcggtttattttcagtatttattttcaaaacatcaagtaaaagttaccttatcaaaaacaaaacgtcaagaaagagtcagtgttattaggttgtctcatttgttatgtaaaataataacaagctttaatgttgagtacaagagctttgtacatatgcaatgcccttgtaagtttttgatatacaggacaaagattataataatgcaacatgtgcactcccaatacactctttacctaaacaaaatattgctccaccttaaaacaaaattattgagttgctaactgaaagtttgtagttcaaaagacataaaatctgaaaaaataacatgtaccattacttaagactttctggaaaagaaatattgacttgatatttgattcaaaattcacaaaaaaagaggagggggggaaaacataccttggtggcttgcttctttttttgatgaagtgagatttcattaagccatccagtagatgcaaagatacaaaaggggggatctgtcagctcagtaagaacaaaaaaccttatatagctaaggagccgacaaaatctaggtagtgatctaagtaaatacaggggagaagttggcccaactaaaaaggttaaccaaacaactagccttaagcttacaaattgaagttaaaactgcatcgaaatatctcctgtttctttcattccaaataacccaaaaaatacaagctggggtcatgatccagattttcctgatggattttctaacttccatagagctccaactagtgtaggcatctctgatattgaagggcatggaccaacttataccaaaaagcgctaggaacatgttccaaaagtgtgttgcaaaagggcagtgaagcatgaggtggttgatgctttctgaagttaactgacacatgtaacacctattgaccagttgaattttcttctcataagattgtcttgagtgaggcatgcttcttttaaggctgtccaagtaaaacacgagacttaagggggaagtttagtcttccagactaacttccagggccatagatcaatcatcattttattggggctcgagtgttcatatcctgccttgactgtgtataaacctttgctgttgaagttccattttaacttatcactgcgctgaatgttaatgttgcagttctataagcttttgagcagattcaataactctttaaattcccaatcttgcaaatttcttcttaggttcaggttccaagagttgtcatccctatactgagcaatacaataattaggatgtctggcgatgttaaatatatttgggaaggctagtggagtctcctgtccatttgtctagccagaatctgatatggttcccattccctgatatatttggtggcttccttttaaagattgccagattcaaaatcaacaatgacaaccctaatgtgatcccattagtgaggtctggggaggatagagtgtacgtagaccttagccctaccttgtgtgaggcaaagaggttgtttacgatagaccttcggctcaagaaaattgcttttaaaataggcatgaaaaatacaagagtgaaaaacgctctaatgaaaatacttagaaaagagaagtattgacaagaaaagtactaagattgtcagaatcctttaattttaataggggaaaagggttaaaaatgcccttaacgtatctcaaatggttcaaaaaatgccctccttccatctttggtttaaaaatgccctcaacgttttcttaaggtttaaaattgtcctttattaacagcccactaacataataaatgatgactcatttaattagccaagtgactttatcttattggtccacctaatttttaaaatccagcccaacgacccgacccatctgtgctacaaaacttaaacccacccaaaacccattttcatattaacctatcttatctttgagctccattttaggacgactctcaaccccttttgtagcatccgacgatggcgattgagggttgcaaatcacaacacctctagttatgttcttcagtataatactttttgtttcttctaattttttactacagttgattccattactctgcaacttaggtaatgttttgcttttttaggagtttgattaggagtttgtgaaagtgggtttacagcagaatcttgatattgatcagtttcagctttatgttggaataatgagatgtttttgcttgagaattgttgaaattcaggtcaattattgacttttaatgagcttttctgctctgggtcgatttgctcctaagctttcaaggcattttctgaagatatgtagggggattctattaaagatgtctgtaaattgcaaattgttgggcacgaattagagcttctcttcaagttttaggctgaagaaggccagagagtctttgctaggaccaaattgtgggtggagatggcaaatgaagcttttgtttttatggctcattttcttgggaattggattttttggttggtcattagcttgaatggtggtgtttatagttggaagcaggaggcttcagaaccaaaggaagataaatcttattttcttcttgaaagtttcaatgtcagcaagtaacaaattcaagatttagctaaccttattctttgtagttcttccttccttttcttcttgaaattaactgagaaatggaaaaagaagacgaactgaaggaggtaggaagaaagaagagagttagaacaaacgggaacaaaagatccaaaattaattggtcatatcgggtcaaatttgaaatggatttctagactaagtgggtcatatattttgaaatagataaagaaaatccatgtcacaattgccatgtcattgtgctgttaataaaaggcaattttaaaccttaaaaaacgttgagggcatttttaaaccaaaaggtggaaggagggcatttttgaaccatttgagatacgttaagggcatttttaacccttttcccttttaatagtagtagagtatgtttgggtgttacttgtagcaatttcaatccgcatccatccctaggaccaaggcaaaaattataatatttcattataaatttaatatacaaagtaaaaaaacctactccaatcattcggtacggttatagatttatatcgaaacctgtggttttaaactaataatcagtttggtaaggtttggttctgttggtttacagagaagcattgatacccctatctttataataaaaggatctggttatgtggtcgaaatcattactttttcaatgagatgttatcgtgtttaagccaaaaatgctacatatattaggatgtggaaagatttcccataatatcataaccagaaacgagttttgcaatagccatcacccaattcttaagggccaccgtcaatattagcattataatttataacatgctaggaacctgaaatgaatactataaaggccctagcaagttcgtatcacatcttcagttagaccctagatgttcctttttcgctttttcttgagctatgaagagaaactgctaagtttttggtcacattctgttgttggtacatccagtatccattacttacttctttaatacgtatgtatttattttttgtctacttcttgactggccttctattagatctgcataaaatttcttgatatattaagcagatatttgttgtcctttttttttagtgtgagatgactggagttgtagtggatattggagatggtgctactcatgttgtacctgttgctgacggttatgttatcgggagcagcattaagtcaatccctattgctggaagagacgttacactcttcattcaacagctcatgagggtatgtacggcatctctcagaattggttgaaagaaaaaaatgtgttgtttctcttcattcaactcctcgcctaaaaataataataataataaaaaaaaaaaaaactcctcgcctaatttgtttcctatctagtagacaaatagaacttgttaaatatagaatcaagtgggacaaatgaaatagaattctgatatcctgacatttggtgtttccttgttatgacttgtgataaaataaattggagttcaaagaggatccaagatatttaaaaaacaagattattttattaaaaaaaaagatatggaaactatgtagtaattgcaacctctagaaatgactacactcataaactgtagaagggggaaatatattccttagtgtgcaagctcctctagttgtagtgattatggtgcgagtcgcaatacctaggttcaatattttgttcataacatgatgatatctcacttatttcatcaaaaagaagatatgttattatgtgtggacaggatagctgttctttgtttatttcctctttgcatacagattcttggtaacggatcagagcattctttgcctgaaaaatataactgaggccttacagcatttttcttttttgcaagtggaaaatttaagtttgggagagtgccttgttacttgttgtagcaagcatcatcttggaaaaattgttaaaaagaacatcctttgtcagcagttcccaattaattctctatcgctaaacctacaaggctacaacatattttcactaattgcagtaccactacattggttgatttacgctatgcatctgtttttatttctttagagttttgattccaaaatcgggtttgtctagtgtttcctcatgtgcttcactccaaattgacttttcgggtaccagcgcacagacatgttttgaggtctcagtttgaactttgaaattttgaaaaggtgcgtgttagcaagtcatctcttaaatgttcaatctaatctatttgattcaatgtaggaaaggggggagcatgttccaccggaggattccttcgaagtagcccggaaagtgaaggaaatgtattgttacacttgttcagacattgtcaaggtatgatttggttgtaacattgtctaatatacagctagtggaaaggggaaaaagaaccttgattaagaggaaaaataaaagtttgaagttccttgtgataatgcctaccctgcatgttgttcttccatcctactcttgagttgaagaatctgttctacgctaagttgctcggactctccaaaaatgttgccgcacccgtgtcgaatcctccaaaaatgcactacttttgaaggatccgacactcacctggggacatttttgaagagttcgagcaacataggttctacgttcctgagaatgagagcaactaattatgtcaagatttaagctgcttatcatcctcttcttacatctgagaatgaaattagcaactgaggatcacttgtgatttattttgttgctgcaaatgatttcaggagtttaataagcatgacaaagagccagggaagtacataaaacattggagaggtacaaaaccaaagacaggagcaccttattcatgtgatgttggctatgagcgatttcttggtcccgaggtgtgctctgtgtttcaagtctctgataatttcaagctcccaaggtcttcttgcagcttgttttaagctgaaaaatcatgtagttgtagacattgccccaattatttacagttgtacgcctcatatactgctggtttgctgcatggcagagtgaactctaaaggtcttataatcaacatacaaaggcaacctgatgctagatcccgttatggacagggtccagggaagggctggaccacataatcaacatagttatagctaaataagaaaacaaagcttgtagaggtgatgcattatcgctaggttgggtgaacacctttctgatttaagaactggtttttgcaggttctcttcaatcccgaaatatataacagtgattttacaactcctttacctgatgtgatagacaaatgtattcagtctgcacctatagacacaagaagagctttatataaggtaaagttattgttgattaaatatataagatttccgttaatcaagtgatccagcaatgtgtaaccagtagaaaagtctcccttatatggttgagttaaaagtcatgatcttgatatcacgctctttgaaataattctttgaatgtgtatgtgatattatgcccttgtaaaatactagaatattgttttatctggaggatccaccatgttcaaagacttccatagaagattgcaacgagatatcaagaagattgtggatgctcgtgttcttgcatcagatgctcggttaggtggaaatgtaaaagtaagcatttattctttaatttttatctgaattaattgatgaatgaatctttggtctctggtacctaaagatgctcgcctactgaaaacatattcactcaggcacaaccagttgaagtgaatgtggtcagccatcctattcagagatatgcagtttggtttggaggatctgtacttgcttctactcctgaattttttgcagtaagttaattattcgatttctgttaccttaggttttataactgcaactgaagttactctttgtaaatggctggtcagcgaagtctgacctatttagttgtttccttatatcaggcttgccatacaaaggctgaatatgaggaatatggagctagcatatgtcgcacaaaccctgtatttaagggaatgtactaactacaatcagtgaaggcatttctcatcgtcatgttctcctcccaataccctgatccttgccctacttctcaacttcggtttgcaatcctacatccatgaggactgtgtatgttaacaggttattggaggcagtacattgtagatttcattcattgaactgtgagaaaacaagattcttgtattctttccataggaagcacatctgtcctgcaccttcaggatacggttgaccacccttggtagggccggttggcacttcaatggcagataagtttcaccgaacaattgaacattacctgagctgaatgtcattttctgagtgttcggttgagtcagagggctacaagtatacttagtttcaaggaaaaataataagctgtcatacgatttggggtttgattaggaggattgtaggatcatttatattctttttctcttttttcgctttaattgaaactttgaatgttatatagctacacttgtacattattctcactgttggggaaacctttttattctttttccagaataatgtatcatagattttgcattt

SEQ ID NO: 115 - DNA, 2665 bp, Solanum tuberosum
  source 1..2665: mol_type = genomic DNA
ataaattaggaacgtgggtgggtgtcaattagtgtggcaatcggaaatgtcgaacgttgtagttttggacaacggtgctggcgtaatcaaggctggtatcggcggcgaaagagatccaacagctattgtccccaatagcatgggccgtccactttcttccaagaaatggcttatggctgaccagcttctttccccagacgtcgacctcacttcagccaccgcccgccgccctttcgaccgcggttatcttatcaaccctgatctccaatcttccatttggtctcacatcttctcaaaccttctcaaaattactccttcacactcttctctacttcttactgaaccccttttcaatctcccttccatacagcgctcaattgacgaaattgtattcgaagattttaattttaaggccctttatgtatctgattccccttctttggttcatctttatgaggcatctcgtcgcccttatggccttgtttctaaagcccagtgtagcttagttgttgactgtggattttcttttactcatgcttccccggtctttcagaattttacattgaattatgctgttaaaaggcttgatcttggtggtaaagctttgagtaattacttaaaggagttggttagttatagaagtgttaatttgatggatgaaagtttccttatggaccatgttaaggaggaactttgctttgtctctttggatcttcccagggacttgcaaattgctaggtaatgcttattaattttcactttactttcatatttccaatgactttgaatatttgttgtgtcattgttatcattctgtggatatcaaagttcatgccattccgaattaagtgacaaactctgtggatgtcaaacttcatgggctgcaccttatggggtctgtttgctcttattttacttaaataactagttcaaaaggatgggggcattaactcaggatgggtcgtgtactggactacccttaattagttcaaaggggtttctaattatttgaagtcaattatatgttttggcccctctgaaacaaatgtagaattaggatccttcaatgccatgacgtttgaaccattttctaaacctaaaacaacttaaaacttagattaagccagcagaaaatccacattaaagtaagatgatctttgagtgccaaacatgctgggatctcccttattcataactactgcattaatctcccaggaaaccggggaaggacaatttgtttaggtgcacgtatgtgcttcctgacggtgttacacataccaagggttttctaaaagaccctgaagaaccaaagagatatcttcctttgtatgatgaagctctgcagcaagtagaagaggaacaaattgatatggatcagctcgagaacactgacaattccgaggacaggaacagaagaaatggatcaaaaattgatttgacaaaaaatgtactttttccaagcccttataaatagcttatcatcctcttttcttttattctaatttatttgtatgaacaggaatttggcttgacaaatgagcggttccttgtcccagagatgatgtttcgtccagctgacttgggtccgtatcacagtgtatctttgacttttatttcagttttgtgttcaattgaagaatctgcttcaattattcagcattttttcccttccatgtgaattagagtgtctggaagtgtagctctatgaatttgtttattcctaagtatgaatttggttgtcagcatctcagttattggtggcttacaggactgaatcaggctggacttgcagagtgcattcatcgagctatcagttcctgccattctcatcttcaccctgttctatatgagaggtagtgcagaagcctcggtgcatctcaaaagcttatctactaatattggtttatgcttatcttcctttttctaatgtcaatgtattgaatttggacgaggaagcattattctgacaggaggcagtactctatttcctcattttgccaaaagactgtaagatgcagcctttattgcccattgcttacgaaaagccggatgttctatttgcttatgtattgaaaattcatctcaatgcagagaaatggaccttcggcctcttgtcccagataaatatcgtttaaagatcacgactcaagaagagtaatatactgtccttttggaggaactgttcaaagtgtttgtacttctctaacatgtcttttgttactgtttgcagtcctattctaggtgtttggcgtggaggatcactcttggcatcaagtcccgactttgatgcgatgtgtatcacaaaagctgaatatgaggagctgggatcagcaagatgtcgaaagagattcttccactaacttttctagtgttatggagaggagaaattcagattttaggatgatcgtcggcctctgcagttgcaaatgagctaaatatggatgtgttttcccgagaaaaaaaatcagatttgttctgaatgattctttttctagtctgtttcttttaaatattgcagaactccttggttggtctaacttatctgcaatgaaatgttgttggcatcttcaatgtcaatcctgtttctcgtctcgtgtcgcttgtccttgattgtagtatgggtgttatgttgcaacttgttaaggacaagatgaaattacgcata

SEQ ID NO: 116 - DNA, 6405 bp, Solanum tuberosum
  source 1..6405: mol_type = genomic DNA
tatccacgtgttgctcaaatcagtctatctttgcaaatatgaagatgaatttcagttccatattcagctaaaaactgttataccttctcccatttcatgactggagccgtgccagaacaataaaaacactaccatggctatgttgttacgcaaggtatgggaatccgtatctactcgttccacttcgagtaactccacctcaactgtcaattccatggatcggtttgaccagatgatgatgtatataccgacggcgtccaccggagaattcgatcggattccgttagatattttcattcaaattttgaagattttagggccaaaagagtctgctaagctgagttctgtatgtaaatcgtggaaattcattgtttccgataatcggctatggatttactttcttcagaatcagcatgagccttgggattctacttttttctctgaaactcacttgagatctggtcctcttcggtaaattcctttttacaattgttacttaatcgaaaattagttgtgcttttggaaagtcaaattaggtgaacttgacatgagaaaagttacaattggtttaatctaatttcgctgaactgaaatatgacaactaatttgggacggagggagtagtagatgaaagagtgaattgtagatgaggatatcagtaactggtttgataaggtgtatgatttgtaggacgtttccaaattcagtaccagaactgtcattcatgagtatttatggtcaacgtgctcaagtgcccggtgctattatcattgacggtgcgtgtatttcgatgtgttacaatcgaacttttagttgacataatgctctagttgttgtgttttactgattcgaggataaattctaatgtaacagagtattgtgtgacattacaaagagaaatgatttctttgagcttatttatctttctgatttttctcactaaaaggtgggtcaggctattgcaaatttggttggagtaagtatagtgctccgtcagggagatcagcgacattcttggtgagctttcttatgagttaacagttgtagttgtcaattggtgaaaatcacttgcacttttgactatttgaggcctttgttgttcgaactatttgttgtgttccatgggctagacaaattctcaccctaatccttcctgaaaaattgtcccattgacaggaatttggcaacattgaatctccaatgtattctagattgagacacttcttttcaacaatatacaccaggttcgtgttccgttcatttttagtgtcattctacattggtcccatctgacaacattagaagtcgtaaatgtaccttttttcttaaaggtgcttgaccacctaaaccaacatccattgttgaccaatctaaacaggtttttggttctcaaacataatttgattttcataaaatgctttttaacaccataataacaggcctctacgatattttttacattattaattgattgtaatatggacatctggttgccaaagaagaatgtgcatcaaaattttatctatgaaaggactcactttatcattatgttgccaaagtggcacatatctgattgtttatcatataattcactaacaagatttcctctatttatattataaatcaccagttttacccactaagagagcataaggtataaaaggctggattcacgatgacttccagaattactaaaacacctcatatcttttttagagtattacatatagctccctacaaaccggaattagaagataagatatgagcttgttactgagacccaaggttgctggaatccttttctaaatttctctcttctgctgttatggattctatgcaggatgcaggtgaaaacttcaacacagccgatcattgtgtccattccaatttgccattatgatggtcagtttctatttgggcgttgctgaaaatccagtcaaatttctgtaaatataacctatcaataactcaatttgttgtttagagggcaaatactatttcacaatatatgcatatgtgtccatttttacttgatgaatcagctcatgcaactctatttttgaacattcttccatttgacttttgagcaagagggtaaggtgctaaataggtttgaattgttatctcactcaattaaatcttcaactattaagaagtgagcatagtaagatcttttcagtggctcttggtgcacgtacgagggtgtagttgggttctcaaagttcatcactatgtttgttctcttatttttctttctaacttctctttacctatacagatactgaatctgataaagcagctagaacgcagttaaaagacgcgatccattctgcattatttgacatgaatgttcctgctgtttgtgctgtcaaccaggtagtacttattcatttccttcaacatctgttggatttccagaggtgattaaagttgttagttttgataatcttggttgtacttttaaaagttctaaactcgtagcaaaactttgttagataacaatcttggttgtacttttaaaagttctaagctcatagaaaaactttgttagattgaggaagaagaaaacatttatgtcattgttgagcgacatttatgaacatgttacatataaagcagaatctgttcctttcataagctagtgtatatcacagataagcttttctttcacgtaaccgtgtgcctttctagtcaggcattcacctgcttgctgttgtggcatgtcctggtccttaggtttattgaattttatctttcgtgccttagcattgggctactcggcgctgctaccaccaatttaatacatacccaagtagcctcatcctactatatttgacttcttttgctaattacagtagttttccatccctgaaaattttaattaacataaaataacagtacatatttctcttatttaacggttatggacttcgttcagtcaaatagccccacttctcactttccactaataatatctgatacatatttgactaactaatgaagtacttgatgctttctattgttaatggcaaaaactaaatattattaacatggggagagaaaatgatcaaaatgtcatgaccaacttggcaaacttctcctgttctctttctaagattgtaccatacattaccaagattcttccaaatttttagtgataatctgattttggatttataattaatagtatcataatgtctttctttcaaaaattataggccgttttagctttatttgctgcaaggaaagtttcaggaatagtagtcaacattggatttaaccagacatctattgttccaagtaagttttttattcatgtactggacttatggttgttctttgactttattgtaaacttgtctttatagaactcattcatttttaattctttgaactgtgatagtttttttgttttttgagttgctagtaggatattttagaaagtaagtttttattctccagctttctgagtaaatcagcggtgaccagacaacccctgagatgaatcacagatgggttccaatgtttcttgtttactaatttcatctcacatttactttactccttttgaattaccttatcaaaaagaaagtttgtgctctctaattgttcattctttctgatgatttaatctactcttaaatttcttcatgaacaacttacatggattgcatgtttttatttctctttgtgtctgcaatttgattgcattgtttcaataatttatgtgtagccactttgttggtcttttatagttcttcacggtaaagtcatgcaccaagtaggtgtggaagttgtgggaattggagcattgaagcttacaggattccttaaggagcagatgcaacaaaagaatatttattttgggtcactttacactgtgcggacactgaaagaggtatcaactttctgtccatagaacatttagagtgggaaggaaggcggtttcacctagacatgattctttgcactgtttctaccttgcaagttaacagtttctgaatcacttcaaaaatatgtcgtggtaacatttttgttactggaaaccatttcgctgtacataaatttttgaactgttgtgtcgtgtccttctactgccacatctagatactaataatcttgagaagtgcttggtcggataatcatagctgcagcactactgcatatacactagctgctgataacctcaataaaccatgttaaatgcatatcttagttgtgagttctttgtgattttcttctttactacacattgtcgaattacaataatcaatgtaaggtttgcgaagtaatccaagtttaagttttccagaaatttatggtatctggagaggaatgtgattacaaatttaagagttattgcagagcttctgctttactttttcactgtattttgtttattcaaaaataaagatgttattagtgtacaagtttttctgttctttttatcttactaacacaaatcatgttagattcagttagtgttgatcctgtgacaaacatagacttgacaagcctagctgcatgagagttacggttactttttatttcttagtgatgttttcaagtatattttctgaggttcatttggttcatattgcagaacctttgttatgttgcgcttgattatgaagctgagttatccaaagataccagtgcatcttttcagatcgcatctgaaggttgctttacactttcagaagagcgctttaaaacaggagagattttgttccagcctcgcattgcaggagtgtacgtccatattaccttattctgggaactttagtaagaattattgaacaactcccattttcaattacttcccctagggtataaaggcctttaaaaaactggagtagatcctgtacatgacaaagtggatttggactatgtagtcaattggaaccctgttgcatcaggtctttcctgagacttattttcttctatgcaaatggagagagagatttgtactctgggcgggtgggggtagttcgagacatcgtagtatcattttgaggctacagtctactgtggtcaactgatgatgccaatttcttggcttatatcgtttagacaaagtggtgtttttgaggattaaaatggtgaaacacaattgaccccaccccccaattacctcaaaaaagaacaaggatctgtagtatggaaaataagtagatctgtggtcttgtttcaggcgtgctatgggtttgcagaatgctgtggcgctgtgcatggagcactgccaggatgctgaattaatggttgatgatagctggtacaaaacagtagttttggctgggggaagtgcatgtttgcctggattagcaggtgaattgcaacttatgctctttttccctagacaatgtatctgatggaatcatgtgtttgtccgtgttcttctaatttaggaaagtaaaaatcggaagtgttaacagatgaaataaagaagaaatgcaatcttcaaggaaagtactgatttttcttattatgaattttattgcagaaagattagagaaggaagtgtgtggacttcttcccccatgcatgaataatggaatcagagtacttcctcccccatatggcgtagattctgcttggtatggggctaagctgattggcaatgtaagctaccctttctgaacataatttgttgcagtagtttcacttttactcatgcttattgacaaacttgactttgacacgataccttgaattgaaaaattagttaatgtttcttatttctggtagaaatcgtattccaaatttgcattttaaaatgtagaagtcactctacctgcttaagatgtcaattctttcggttgcctcttgcttagttgtttttttttttggttctttgaaattatttacttctgattcgactatgatctcttcttttgaggggattggtgtagaaaaaaaagtgtaattatcatcaaactgacaattagcctgtactcgattatgaatattttgttcttgtcgtcattgaactaatgtttatcatatacctgattatgatacaaattctttgtctgtttactacagttgagcaccttccccacttcctggtgtgtgatgaaaaagcaatttcgtcatagtttgagacgcaagtttatgtggtgattattgggtcagtggcactacaggtggtattgccaaagatcaagagttttgatgtgcctcatggctgaagaacaactattgtatcaatgattagatcatttgttaaagatacaaatataaggctatctatacatcacgtgtaagactaatgttatgtcgttcagtcatgcggatctgctaagtatataatgtacaaaatcttagattattgaggtagttccaaatggagggaatatttgtaagttggacttctagacttataataaaagagaacctttttca

SEQ ID NO: 117 - DNA, 14981 bp, Solanum tuberosum
  source 1..14981: mol_type = genomic DNA
aattgagcaaattcaattatcgggtcaattccaaacagtatataagttaaccccctggccccttcttcatcagtaccgttttctgttccctcaagcttttagccatggtgctcatcttcaccattgctatacacacttcacttttctatattcttcttctcaatctaacaatttttgtttctatacacaggattaccctaaaacagcagttcctactaacatcttcactgaacgcggctccaatatcgtcgtcatcaatccaggtactaaaccctaacttctctcaatttccaggtttttttttaaaaatctttttctgttagctaattaagtaaaatacttcactgtaatttaggttccgcaaatattagaataggattggctcaacatgacactccattcaatatacctcattgcatttcccgtcgcactagtcagttaccgaaacgaaatgctcaagatcaagtaaggccaattttgtgaatttttgtagttaagtttgcagttttatgtgatttttcgcaaaatttagttttgaagttttaagtcatctttagtttgttgatcatattgcaagggtgtatttttatgtgttttgatgatatccttttttttggtggattagatgctgaattctcaggttacaactgcacagcatatggaacgggaaagagcgtatgacattgtaagtacaatgaaatatagtaaacaatgtttaaattatatatttgagcttgaaaaaaaaagaagatgtttaatcatataagcacaaataggaaactttataggtcgatgacatgaatattttgtaatatattttcaatgtctcactttttttcatcaggttgcgtcgctattgagaattccatttttggatgaggaggtagctaacagttcttatccacgcaaggtactagggagaattttctatgctctttaaagtataatatgaatttttttcttggattctgcgagatttccaagtaaatgtgtggtaaggagtggttattgggcctattgaagctcaattttatcaggaagattttaatggaatcaaaactagttgaactacaaagtatctatagtcatgcttcctggaatacctctatcgacaagcttttgtgtgtattttgtgtttatctgtgcagatggggagtgtagacgcatatcctccgcaaaataacatgaaagagccagtgttcacttggaccgatgttttcgagaaaaatgtccctcattcttcaacaacaggtaagaactgtaaccttttcattctttgaatgaagcatttattcgttcaggtttggctgttgcattctcaatgctgaaagttataggtggtgtatagttttcttgtaaaccagttatatgtacagatacacaatattttgtatggagtttgaatactcttttagtcaactactcattcttctttgtccgcaagtgatgtcctagccagttagttgattggcaagtagccctaggttccagctggcatgacaatattttctgctattagtgcctaaagcagccaaatggttccccatctataattctactagtgcttctgtgggtggtctaattcatattttctgggagatctttatgcgtttagatatcatctgatatcccgtgtcaagcttctcagatgatcaatgagcaatatgacaaggatattatacggcaactcttccatagttgatgacccgatcttaaattttggacttggaaatatttttctttctcaaaatttttgttttgaatattaaggactctttggttatatctctactggaaattcagcttctacctattgtgcatataaaagattttaatgcttgtacaccatgagaatactactcaattgatcagaacatccatgtcggagagatgatattttctgattggcttagcttttgtttgattctcaatagtagctggtacaagaacatgcttagtttgtttattctgttatttacacctttatttcaagaatgagcaagtatgttttgcgatagcagaagaagatgtacccaacgagggcaataccagcgagtcgcccactctgaaggaaagcaagattaaggatgaacctaattccagtgaacgtaaatatagagagtacatatgtggagaggaagctttaagaatacccccaactgaaccatattgcttgcggcgtcctatacgccgaggtcatttgaatgtatctcaatattacccgacgcagcaggtaacatcttgtttcaagatttctttagatgcatggaaaatttgatatgcatctgcttcttccagttgtgactcacacattagtaactttatttttgaaatcaatgttggatttccctttccaattttttcattgagcattggcatgattttctgaaaacttttctgttggtttttcgaaaggtgtataaatgtaacttctttcagattaactagagttccagtgaccattattttaatataataattggggaattttaggttctcgaagacctgcatactatatgggagtggattttggttgagaaattgcatattcctcatcgtgagagaaacatgtattctgcaatccttgttattccagagacatttgacaatcgtggtatatatactctattttttccttttcattttttctgtgtctgaaaccagaactctggtaaatatatctttaggctagaatcttgttattttggtcaaatctgcaatttttgaaataaatactataaggtgcatacaccactagatcctggaatttagctgctcatagtctagctagcttctctaattcacatctgcataaggtctcttatgtgtttctcttagttggtttgtaaaaatgccatagtgtcatccacgggacacctgttttcattgatgaagtaatgtgaagtttctgtgttctagagaaaataaatactccactaattggactatcaagagagagatatgtgtgtgtgacagtgggaatccccagctgctccagccttggtgggcaggttaccaacatttgtgcttgtgtgctgtagtaggtggactagctcagggttgcgcaaattggcccaaacaccactatcatttaaaaaaaattgtgatagtgtgttctcttacatatgtgcctgtcctgcagactgaaatgaggataatgaatttaattgacaatagattgagatgaatccaaagagctgttctggtctcgtttccactgattttgggaacggggaaggtaaggcaaaagagagcagaagtataagaagtgggtaaattgaagagaaaagggacattaaaatttgtaggcccaaaaggaaattatatccccatgttccctcttcttcctactgctaacaccaaatgacgaaatggaaagatcagtacttttcctctgcctttcccttatcttgactagttttccaagcattaaagttttcattgcctctccaaatgctgaagatagtgacccatcataaaatggtctctcggagaatttctctgctcatccattacgtggatttgaaattaggaaaatcggaattcagagcaagaactttgaaagagggtcttgttgtccatggagaagcccaacagtttggtgaagaggaaatttccctatggtttcctcagattgtcattttaatttctttggtaggatgtactggaaacaacctctctaccccacaaaggtaagggtaaagtccgcgtacatcctaacctgcccaaacctcacttgtggaattacactggatatgttgttgttgttaatgtctagggattactggtaagtgactaatcttcggattaggagtggaaaacgggcggattgagtcggatatggataagtcgaaaacgagttaaacaaaaatggataaaatacctgaccagtcatatttaacacgaataaaaaataggtttactcattggataatatggacatccttattgtccatattatcattgtggaatatggtgggtctaaattacccaaccaaagctgatcaaaattatcattatcatagtatcaagacaatacctactatatcatagaaccaagagagctcattttactagttttatgtactactttaccgcattattttgtgggggaaccaagagaatatcaactattccctttgaacaatccaacaatattaatatgcttatagttcagttattatgtcaaaccacattcacaaatttccaaaagaactgaatttagcaaggcatagtgtttcctcacaaataaatgctaaacaatatttataacctgcttctttccttctttctaaattctaaggaaataacataatactatatgactgtagcctatgttaaaaaaaaaaagtatatgctgtagcctgtagtttttatctattttgcccattaaattaccatatttctaagtggataatatgggttgactcatatttacttttttttaaaaaaaacttcaggtatccaacccatttaaaatgggttgggttggatggataaccatatatattacccattttgccatccctactttggatagatgaacccagattggactgtaacagtgattggacattttaaaaagattttagtttcatcagatcgaataagaagaagaacaaaacattaatttcatgtcaatctctatgctaacttgccactgctggtgggtgacatagaagttctgtattttactttttttgcctggaaattctttcaaatttcaccttcattgactcgtcaatcaaaccatccattatcctcatagtacttcatcacaaggaatctagtggccaattggtcattggatcttttatgttttattctcttgttttgtgtccatttcctgagagtgctttttctttcataaaagctcacaggaggcttcatagtccatgcacaaacaaggtacaagagttttctaagactgtagaagtggtcagtgaggattcatatagccgaatccaacttgtttgggatttacacatagttgttgtcgatgtgattgtatgtgattgtgactttaccatatgatcacccctttctgtcgttgatatagcactttttgttccttatagaaaatgtaacacttcttgttgtttatgcaaagcagaaatcaaggaaatgctatctatcgtgttgtgtgacttacgctttggttcagcagtagtccaccaggtgatattatgttgctgaactttttaggcattattaagtgattgtatgcacacaagttggaccgaaaccttcattcttattaacctgttcataaaattttccaactaccgacatacatgacagcatgaactttgaaatatatagattgcttcattctatttttatgaagatctgataattgcttgtcccatgctttctaatcaacaataataccaataaaacttgtgtgtatggtatgtatttgttaagcagtgccatttggagctataatcatagaagaccttacatattactacccccattgcaagtttcttgatagacttgctgcactttctaaaaggggatcacatttagttttctaggaattttaagcttacttcttgaaagttggttttaggctatttgatgtagatcaaagttaatacatttcattttcatttaattaaggagaataggaagatttatcttgtacaccatttcgtttagcaataacttgcccaacgatgggcccactttctttcttatggagcacctacttcttgatgaaatgaaaaaagaagggtcagaatctattaaaaacacttatttatttgaagttgggcatagtgggaggaggtgtgggacggtgagtaaatctctgtattttttaaattaataattctgctccccaaaatcctatgtttagggtgtctcatcaatgttttgttttctccttcctagttggctcttatgataatccaagatctaaattatttactcccctcggttccagttcctgtgacaattttttagttcgtttaaaaaaaacccggcagttttctaagtttggaaatattaacacaaaccttctattttatccttaatgacaaacttttatagtgacacgaatgttatggcatgtttaatgttacaagctttaaaagtctcccttcctttcttgatctttgtgccattagttaccttaggagggctaaggaagaaacattcaggatgttaagaagtttgctgaaataggaaaactttactcttgaatatgcaattgcctgttcttggaaatgcagatgactgaaaacaactaactggaagtgctaactgtaccttgtaatcaaacagtagggatgaagatgtatgaaatcatctttgttactcatgttctgtttgaattggttaaaccaggaaggtcttgctgcagtttttggaaatggtttatcaacagcatgcattgtcaacatgggagctcaagtgacatctgttatctgtgttgaggtatggtggctttatttctaccttctatatggttggaaagttacaattaagccccttttctgttacagctttatttatagcactccagcattagaaatgggacccgggataaggattctaagtaactttgatactggcatactgcaagggtttttccttgtgtgttgcggaagtgggtggtggttataactggacatgaatcatgataacgttccgaaagtaattcatgttactaaggcatcaattttcacactcacagtaatggtttctttcctctttatttcttaaatagattttccgaacggctcttgccacctattatgacaggccatgaatcatgattagtacatccagtaccatcagtgctattgatgcacacccaagtataagaaaatttctcattattcatagtctcaatactaggttaaaattatacaagaaaattgggattctgagagtgctattctatcattgtcatgatatctttcattgtcattacttcactgtgattactgcttcaccttggtctccccaattgctctgtcaatgccttgttatctatgtagatgaccaacagtctatacatttgctgttacttaaatctggaagcagaaagaattctgtgatattcttatgctttttaacaagaacatctgaaaattgctatttgacctttatgctgatcctccatgtgttcatatgctaatggttgatgctattggacaggatggagtggttctacccacaacacagatatctttacggtttggtggagaggtgagcattcagtaaaaagtatggattttactttgccgagtgaaaaagtcgagaagctcaatttttattttttttaatcttttttatgctttgcttatactagaggctattttcatttttatttcttggagatgccatctgagtttcttttttaagtagggtgagacataataaactgggaacttgtttaatcggatgtttctattgaatagttttgctgtcaataggctgcttatgcttgacaactcaagagggatttgcatagagaagttgaaatgagctcaaagatcaagaatcttgtacctcaatgttactgacttcaatatatacatgtcttatccttgttcaattagtcaatcacttatgccttaatgccagctggttagttccgactgtatgaatcccttatattcattcctctctctctttagaccttcctattccaaactaaattacttttcttgtaaggcaaatataagggttctcaaacctagaaattctctaaatctcacacttactgtttgatataaatgtagcaacaataacaaaagaatctcctctgatttttctctaaatttcactttgttaggtatttttctatcgcataattgcacctctactaatcttccttttcaaccatctcattgtattctgtgttacatagttatttatcatgccattctcatagaatattgagtctggatatccatattatttgcatttgagtatcacagtctcgtctgatctcacttcaccttcaatgttattataaggtttaaaaatgcaacacattgtattttgtctatttctacatatcctacatctttagtctccaaattgcttctccatggttgatagttgcaaattttggttggctgctttgctagtttcatctattaatacaatatcatctgcaaatagcatgtaccaaaaccttattatatgtgttattgttaattcatccataattagggtaattaagtacgggctcaactctcaaggcagatctctagtgtaaactcacagtcatgactcctttgtttctcctttcgcagttctaacatttgccattgcccttatatatatgtcctttgtgagatattaatattttatgtgtttttttcttctcatacacccaccaaaaggacttttcctgacactctatcatacccttttctaggtcaattatatatcaagtgtagggatcattttcctctccctctaaagttacttctatcttagatctattgctcgtgaatccaaactggtttcacctttgtaatatccccaagtctatattcgataactttattccaaagatctatcatatggtgcaaagttcaatattatgttaattagcacaaacttaactatcccttgttcttataataccggaacaaacttttcttctccttgtctttataatttataaatgatgcaaagctctaggaattttttggaaaaaccggggtttctttgtcttcaagtgttgatacataatataattaaataattaaaaatgtgctctcactaatggcttaagcttttagatgagatgattacacatttcagcgtcaagcttgaagcagtttattaagttctcggtttctcctttagtttttcctcaatgattttttaattgtctttcgtctttcttagccaaccgatctgttttttttaaaaaaaaataaacaggatgtatcaagatgccttctctggactcagaggcatcatcaaacatggccacctattcggactgatgccctgtcaaagcctgtagatttgctgatgcttaacagacttaaggagtcctactgtcagatcaaagtgagtttcctaatatttaagaaaatacaaatttaaggtttttaacatttatatgctagaaacacgtatagcccattactggatattcttcagtttggtaatcaatatatgaagctgggaatgtatatccaaagtgtccttgggatgaatagagactagtggatgatgttcagtctaattgttcaatttatcaccttctattgtaatctaccgcactgtttgtaataactctagttatgaataggatgcatccttacatgaacacctaaatgcatgtttaatttattccactgtccaggagggggaagtagaagctgttgctatggtacattcatatgaagatggaatgcaacctggatctcataagactaggctgactgctcttaatgtatacctcttaacctcaaaatcttcttgtatttattttgcttttgttgaagaggatgtgtgattaatgccatttgtttaactttcacattctaactcttcgaagatatattctgcttatgcctcataaggggcaacattttcaatgcaatatatcacaaggttactgctttacaagggagtgcagctagtgttttttgtcatggtttgataacttgaattgtctaatccagaaaagttattctttaatcataattcaatgaaaatccaaaattaaatcatgacatgcttttgcaattgaagctgagatatcatatgagcaattgtgacatgattttgctgttgaacatgagagatcccatgttaacaattagctaatttttttacagtatcaagttccatctgtatttcaaaagaaagaggcagatttggtacttgctgataaagatgaaaccttgaattgacaagggttgatgttagtgcctgatagtttgctaatacaggttcccccgatgggtttattttacccaatgcttttggttccagatgtctatcctccgccaccccgctcttggtaagttaagtatatatgatgtcactaaatcctttctccctccttctgtgctcagttattgcatctaaataggtttaacgattatgatgatatgcttgaggacacatggcacatggacttccctggtggtggtgcatatccgatgtgggagagctacccagttttccaaacaaagccaaagaaagaagatattattggccttgctgaagctattacaaagagcattcttttgacaggtgataatagtgatctattctataatgtagtagaatttggatatactctttctgagccttgtttcatacaattgacagggcgtattgagttacagagaaagttgttttgcagcatgcaactggttagttgtttaaggcattaaacctatagttattgtcctgtggtttgaagcgtgatatttttcaactcttcagattggtggagctgcatcgatttatggtctcattcctgctgtggaggaaaggtttgtttcgagtctagttttgcctgaatttaaacagaaaaagaaaacaatgcccctgttgctagaagttggacataattatatatacatatcatcaatgaatattccaccctctgtttagaagatttttaaagcataactaggcgactgcattttggcatgttatcaggtaagtgctaataagtagttcaaaattttccaagctatagaaatggtttaggagatcactagtagtctagtatgctttgatgttttttgtttctaacaaaatagtatgcttttatgctaactgcttactttcgtatccagagttttacatgcaatcccttcacatgaagcaattgacactgtggaggtaagttttgagcttttgatttctttctattctagttgttatgccgttcttcaatatgcatttgcagacaatctcatgaaccttatatcttctctttgccagatgcataatccggcttcttgatttaatcaaataaaattatatcagtcctgccccattatcatcctaaggtttcatcatgtgtttggccttctcaaatagttccttcagatgcttagattgttttcagcatgctgaagaacagaaatggggaaaacaaattgaaaagggaaaagagaatccaaaaataaatatatgagagttccttggtatttccttaggaaacatacacgtcttttgctctcacttgttgatgagtacaaattagttgataagcaccacatactaataatgccttttaagtataaaaatttattttataaataagtaattatgtgttggagggggacatatcggttgaagtagattcttcttttgatcaatcaaaaccccttcccaaactgtacaagcttcttccaaagcatacggctttctggatgtagatgatgatatcaagtaccgaaacagataataagcaggcagttgatatgtttgatgaaaaaggcccccaaggcctagctcaagtggcaaaaggtggaggatttgtggcttaggtcgcaggttcaagctccacaccatgcaaagcgaagcctggtatttaagtggagaagggtagaggggcgggcccattatccaccgagtttagaaggctgtgattggtccaaagggcgggtcacaaacggatttttcggttataaaaaaaaataaaaaaatatgtttgatgaaaaagtgttgataatgacttatatcatctaaaatgacttaaatgcttttgaagtagtttgcactaaaaaggagtttcattattttggcaccttgaaaaaaaggagctgattattgcaagattcttaattctaattgattcaactacaaattaacttatgtatcaatttactctaaattgatttgataggattatttttaataaatgtaaattaaatgcaatagacctaagcacaaaagagagaagaacaaatggtgaaaatggaatgaagagggagttaggcgttttctatgaaaagggtattttgaggtttaaaaagtattagggattaaatagttgtcatgatagggcaatctatttaagatttatatttatatatggaatgaatggataaaagacaaattcttaagtgttcttttgttctgtttcggattcatatagtcgacaccaacttgcacggatatgaagcgtagtgattgtcgttgttgccattttttccctgtatgtagattccttcgccaactaatccaactagttgaaatacatatgtaaaatggaccatgtgtgggtaaataattggaatggaactttgaggaatttttggctcaaataggtgcaatagaaactattgtgtttgggtacccatcctcttttggggaccttactgtccttgcagacttacatcattttgttttcttctcatcttttattctctttttatatagtaagttgctgtcaagaatttacatttatgtttgtatgtacatatattaggtcttgcaatcgagaacaaatccagcatttgtgtcgtggaaaggcggagcagtaagtagacactacttttattagaggttctgctttgtttccatcacactattttttaacggctaaatcctacattctggtaatatggctttgatacaatttagggctttgtgttataagttattataaggaggtggtaaaaaataagcaggcaaggtagctctcacaccacaattataaaaggaataaaaggagttgataaataataactatttattatagcattacctgaagtgtgtttttgtcactaatgaaataaatggcactgaagagtctgaacagcgtaatggggctgctaatcgcatcaactgacctgtaagagtctgaacagtgtaatgagtctgaacagtgcttaaagaacagttgatgctacagattattgttgcgttgaacctattttggtgcataatttatgaataacatctcaattcaagatcttaagagggacaatcattgtattgtgttgtgctttttgtttactaatcttagttcctgaagaatactaattgtacactattacagttggtagaattcttcttttcgaataaccaccagctcaatttgagattgctatatccaggatgctaaaaatgtacttatcttgttgagacgattttcttttaatgatgcataaggtgatacctgttcaaccaaatcttgtaccatgcttcacttttaagtttgtatgagactctatagagttagtatcacttctatgcactgcagatcctcggaattcttgatattagtagggaggcctggattcatcgtgaggactggattaaaaatggaattcacattggcagtgggagaaagtacaaggattcatgttatcttcaagcacaggcaatgtgctatctgaattcataagaggtacaaataaatgttgctctaatttatctatattcattttcaactcaggttttatacgtttgcttttatttttgcttcagataagtgggaagggtaagggatgagttgggggattaatctagaactgacgatggaattgaacggttacgattattatctttccttttcgtcctgtcaagacataattcttgtccttgccttctgatttcttgttattgttatagtgctggactgcttnnnnnnnnnnnnnnnnnnnnnnnnnnnnnnnnnnnnnnnnnnnnnnnnnnnnnnnnnnnnnnnnnnnnnnnnnnnnnnnnnnnnnnnnnnnnnnnnnnnnnnnnnnnnnnnnnnnnnnnnnnnnnnnnnnnnnnnnnnnnnnnnnnnnnnnnnnnnnnnnnnnnnnnnnnnnnnnnnnnnnnnnnnnnnnnnnnnnnnnnnnnnnnnnnnnnnnnnnnnnnnnnnnnnnnnnnnnnnnnnnnnnnnnnnnnnnnnnnnnnnnnnnnnnnnnnnnnnnnnnnnnnnnnnnnnnnnnnnnnnnnnnnnnnnnnnnnnnnnnnnnnnnnnnnnnnnnnnnnnnnnnnnnnnnnnnnnnnnnnnnnnnnnnnnnnnnnnnnnnnnnnnnnnnnnnnnnnnnnnnnnnnnnnnnnnnnnnnnnnnnnnnnnnnnnnnnnnnnnnnnnnnnnnnnnnnnnnnnnnnnnnnnnnnnnnnnnnnnnnnnnnnnnnnnnnnnnnnnnnnnnnnnnnnnnnnnnnnnnnnnnnnnnnnnnnnnnnnggggggagaggggggagagagagagagagagaggagcgtgtatgctttcatattgtggtaattgcaagagagattttgagagatcacactgggaagtataaaatcgaactagttttggtcatcaatattttgtgtcatgcacgcgtattcagaattgttcgagatggaagaaacattcaaggagtatgcatagagagatacatctagacaccacgatcaccatttatacacattattatttcatttcaatcaataagtaagcagtaaatattttacttatgtcgtaaatgcttcatctcctctctgcttcttctcgtttttccttcttttgctcagttggatgttcttagaggtgggacaaatatgtcgagtacacgcccactgggtcatacagtagccttgaaacatatgcatgctttccataggtcatgcaatgttattactattaacatttctctttcaattcctttgttgttcagctttctgctgggttatgagatttgatactgatcgaaactggagcttgctagcttatcttgaagacgaaagaactgtaagcctcactcctccctctggactcatatggtagcccttgtgaacgacgattcgataatcctgaaacctgaaaaattattcaagaattatcactgagcaaggccaatctgaagtacatcctaatttctagaaaacttaagtcaccgtatagggttatactaatcttgctattctaacttatttaagacgattttattctcaagcttatcggaattttcatagaattggtttgctagctgaccctcgatgtgaataattaacttgggaggaatttaattagtcaaata

SEQ ID NO: 118 - DNA, 2606 bp, Sorghum bicolor
  source 1..2606: mol_type = genomic DNA
ttttctcccacccggatgcgcatataaaaaccgccgaaacccttggctctcctcacttgaccaccgcaaccacttctcccctgtttcctctcgtgcattctccgtgggaagcgaggaggactcgcggccggcggcaggttctgctagatctccgggtaagtgttgaaagaaaagaaaaattgttggaggaattaattccgaatctttctccattgcgattttggtgtctagtctgaaacgcgcagttcatcccattcctgcccacagtagatcagatccgatttgctcctgcggcaggcattgcgattgctgggccctggttgccgattagttatcgacataaaccgcggccaagccccccaagaagttcttgcggggtgacaagaagaagataaacagtttggccatctcgcctcgcaaggataaccgcccgttaatgcatttttgtttcttgatttctgaataaacataggtattattcgatttctggataatagagtgccattaactggtccctgcatagcgtggtattggttacagaaactgtgccggttctgtagatttagatgaatcacagtgtcaagagagacaggattcacctgaatccttctgttaaattagaaaatagacatgatccaaggtcctgtgatttctcagtgagtagtcgtgtagagtttatttattttggtcctgtttcctttgctgaaaatgcagttaataccaagttttctgctgtttcctattaagatagatactctgttactgatttttaccctttggctcctccttgtgtttttgttccagaatctgtagcaaatggctgacggcgaggacatccagccccttgtttgtgacaatggaactggcatggtcaaggtttgtagttcttgttcatgctgctacttcatattcagcaatcttgttctgctaattttaataacacgctttcttaacttttggcaggctggttttgctggtgacgatgcgccaagggctgttttcccaagcattgttggacgtccccgacacactggtgtgatggttggcatggggcagaaggatgcgtatgttggtgatgaggcccagtccaagaggggtatcctgactctgaagtacccaatcgagcatggtattgttagcaactgggatgacatggagaagatctggcaccacaccttctataatgaactccgtgttgcgcctgaagagcaccctgtgttgctgaccgaagccccactcaaccccaaggctaacagggagaagatgacccagatcatgtttgagaccttcaatgttcctgccatgtatgtcgccatccaggctgtgctttccctgtacgccagtggacgtacaactggtaatgattcgttcacatggtgaccaaatttcattaggacctccaatttttttagcgcaaaggacctccaaaattttcactcttaattatggattgctgtggttcattcaggtattgtgttggactctggtgatggtgtgagccacacggtgccaatctatgaaggttatgcccttcctcatgccatcctgcgtctcgaccttgctgggcgtgacctgactgacagcctgatgaagatcctcactgagagaggttactccttcaccaccactgccgaacgggaaattgtaagagacatcaaggaaaagctcgcgtacgtggctcttgactacgagcaggagctggaaagcgccaagagcagctcatctgtggagaagagctacgagctgcctgatggtcaggtgatcaccattggggcagagaggttcagatgccctgaggtcctcttccagccttccttcattggtatggaagctcctggcatccatgagaccacctacaactccatcatgaagtgtgatgtggatatcaggaaggacttgtatggtaacattgtgctcagtggtggcacgaccatgttccctggtatcgcggaccgtatgagcaaggagatcactgcccttgccccgagcagcatgaaaatcaaggtggtggcaccgcctgagaggaaatacagtgtctggataggaggatccatcctcgcctccctgagcaccttccaacaggttaaaaaacttgcacttttttgtttgtttccagttgctatggcaaatattgcaaccgttcagtagttctagtatttctttgtactgaaaaaatatgctctggtattatttttgtacagatgtggatctcaaaggctgagtacgatgagtcaggacccgcgattgttcaccggaagtgcttctaagcttaaggcccatccccacttcggctccatttatgtattcctttccagcgagtgcttttcatgtaagctactatgtttgagattgccagcctattgaggaggcaatgttgttggatttatattttgtggctcactacaatgccatgcattgctccagctcctttccatgccaagtttgttgctagtggtgaaaacatcaaccacaaaaaaagaggtcggaaattattaaggtacctaggatcatattgtaattgtacttgtgcgagtaacattattggttctctttgtacatccatctctgagacatgcaatgcaatttgtttgattggttgccgcttc

SEQ ID NO: 119 - DNA, 3363 bp, Sorghum bicolor
  source 1..3363: mol_type = genomic DNA
tccagtgcggcaccggccacctttacacctcattcccaccgccgccaccaccaccacctccacctccacgctccaccgttgccaccccagcacgctctcgccgtcgccacgccctatatctcgcgcctctcgcctcccactctttctccatccgcccgctcgcctccctgctacgcttcgtgccgccgccgcaacctcctccttcccgtcccgttccaggtgagcgaatcgagggccccttgccgtactgctttaatgctgctgtttcttgatgctctagaggactggagtctgggtgataggatgcactggggtctgggggttcgttggttgtattatgttctggttggctgttagtgctggatccgtagtaggagtaaggttcgtcaaagttgctgggactttattggtgacctgtgggctgtggatgcttcgatcctgtgtttatgttaaggtggctactagtattacactagatctctttgtaaattttcggtattaatattagcctgtggtaatggatccatggttcttctgtgcaagctctttgtgattagaatttatagaaaggaaatttgtgatccacgtttagagtcgtttaatggatccattgtcctcatttgaaacttcggaaactatggccttttttattggttttataacgccatctggctatagaaatcttggcgaagtttgtgcttccgtagagcagtataggcttatagccaaatgttgcttcaagatttcttgttcaaaaatatttccacctgaaaggggaagagtctatgaagtttgtgtaccagacatcgatgcatcgaatgccttctgatcagaaaatgctaaattcttcagatcctcacttgtgaggaatcataactgggcacgatcagaagtactggctgcagcagcactactcagtaaaacctatggaaatcaagcagcatcagccgctgcagctgtggtagaagtgcagccaagcagagcaactttgttttcaataattgaccatgtgtttgattaaatcttcagggcctggtgtcattccttgtgctattgcacaaagcgtttgtatgtattggagtttagatgctccagagtccagaacagcctgacttttttttgggtatatttacaactaaaaactaattgtttaatatagttggaaaattataaattaatatttaattgcacaaagggttttatttttgtaagaatagtggtttctgattacacttaattgttttttgcttgatttttcacagttaccgttgcttgtgtctttggtttcgtgtttgataaatgttagtactcaatgggaatatattagcctctttttctgagtcaacagataatagcttgttaagatgtgactcatgtcttctgttgggagtaggcacatcagcctttttttctcttactgaagtaattagcacatataagtctacggtcttttcttttaggggaatattagtctacagccttggtaaatgcttctcctgataaattgttttcattcatgcagaattgcagattacaggtcaattaacataaatggctgacgcagaggacattcagccccttgtctgtgacaatggaactggaatggtcaaggtaattgtggtcacttggcatcatattctctactgattccttttgtttttccagacagctttcataatttgattttcagtcaatattaagcattttttccatctcttataggctggctttgctggagatgatgctccccgtgctgttttcccaagtatagttggtcgtccacgccacactggtgtcatggttgggatgggacagaaggatgcttatgttggtgacgaggcccaatccaagaggggtatcctgactttgaagtaccccatcgagcatggaatcgtaagcaactgggatgacatggaaaagatctggcatcacaccttctacaatgagcttcgtgtagcaccagaagagcatccagttcttcttacagaggctcctcttaaccctaaggctaacagggagaagatgacacaaatcatgtttgaaaccttcagtgttcctgctatgtatgtcgctattcaagccgtcctttccctatatgctagtggccgtaccactggtaagtcatcaaataatcagcattttatttgtgtgcattcatcttactgctctggaatcttaatctagtgggaacaaattgaccaatggtgaaatgtcatgtttgcagaccaaaaataactaaaactaaatctaattcagtagaatcttctgcaaaagaacacctggaccatttgttttttatctttgctgcataaatgatatggggatagaaatggatagaaatatttttctttttgtttcattcagttgctcaatgcacattgggattttgttttggttgacaggtatcgtcctggattctggagatggtgtcagtcatactgtcccaatctatgaaggctatgccctcccacatgccattcttcgtctcgatcttgctggtagggacctcacagattccctcatgaagatcctgaccgagaggggatactctttcacaaccactgctgaacgggaaattgtccgtgacatcaaggaaaagcttgcatacgtcgcgctcgactatgaacaagaactcgagaccgccaagagcagctcatcagttgagaagagctatgagctgcctgatgggcaagtgatcaccataggcgcagagcgcttcagatgcccagaggtgctcttccagccatccttcatcggtatggaagctccaggaatccatgagacgacctacaactccatcatgaagtgcgatgtcgatattagaaaggacttgtacggcaacattgtcctcagtggtggatccaccatgttccctggcatcgccgaccgcatgagcaaggagatcaccgcgctcgcgccaagcagcatgaagatcaaggtcgttgctccgccggagaggaagtacagtgtctggatcggaggatcgatccttgcatccctgagcacattccagcaggtaaccccaagttttccagcggatattcggtatgcactaagtttatttgtgaagctctgacattaagttcttttccctgtgcagatgtggatctcaagggctgagtatgaggagtctggtccagctattgtccacaggaagtgtttctagacatcacctagccttatgctcttcgtggaaatatctttgtttgatgacatatctatgggtggttgctctgctatagcttgcagtttttgtgtatgccatatatatatccatgccctgtaacgttgtggagtcagctgagcactatatgaagtatgtagtttggtttgatatatattgattggattattactcgattc

SEQ ID NO: 120 - DNA, 2744 bp, Sorghum bicolor
  source 1..2744: mol_type = genomic DNA
accgaccgtggctgcgctttcttctccttccacccttcatcattttcattcaccccacgaactgctctctctctctctctctctctctctctctcgtcgcgacgactaggggagaccgacgccgccgccctacgccaggtgcccaggtctccaccgtgtccttcgccggcgaagagagttcaccaggttcgcctgccccttcttcttcctctccctctcccttcaagctgggcgaaaccgatctcccaaaccctagctgaggcgtcccagttgtgtacttgctgcatccggatctggtctagttacaactgtagcatgcttgcatccggatctgatctagttacaagcggtagcgtacttgttacattcggatctgatctagttacgagcctagtacagttgcattcggatctggggggggtaaaaagagttttgctagtcttttcttatgaaaatggtctgagctaactagatgcttcaactgggctgtcagttgaagttgttgttgttggtgtgattccagtgaagagcagttggtctttcgtccggaagtagacttccaccacacatgttgccttactgaaatatgaatttccagatgctacataccatgaacaaattgttgtctttctctgtacaagaattggatttagtgctttcagttagcatgtgtgctcgaatccagtgttcctttcaatcatataatatgaagaaaaaaaaaagcaaatcactgatggattctatttataatatgccatgctgcagcaattctgtagaaatggctgatggtgaggacatccagcctcttgtctgtgacaatggcaccggaatggtcaaggtcagtccatcaaccccttagcttgtacaacctttatctcctgtctttccaaatacgccactaatcatgtctgtctgtctatcttccaggctggttttgctggtgatgatgcaccgagggctgttttccctagcatcgtgggtcgtcctcgtcacacgggtgtcatggtagggatgggacagaaggacgcgtatgttggcgatgaggcacagtccaagagaggtattctcacgctcaagtacccgattgagcatggtattgtcagcaactgggatgacatggagaaaatttggcatcacactttctacaatgagctccgtgttgccccggaggagcaccctgtgttgctcactgaagctcctctgaacccaaaggccaacagggagaagatgacccagattatgtttgagactttcaatgttcctgccatgtatgttgcgattcaagccgtgctctccctctatgctagtgggcgtactactggtatgacctgcttctccctttactttggtgttgattcagtttcctactgataatatctcttatggttctgttatgctgttatcaagtgtttatttgaggttattgtcaagttcaatataaagccactgggtttctttaagttatatcttgcttatgagatttcgtaactgagatatgcctcatattgggttaccagctcagtctgtacggtgatatgaattcaggaaattataccatgagtaaataatggaagttaaaaattatttgtttacactgtatggctgagctttccttttttttctctcaatctacaggaattgttctcgactctggtgatggtgtgagccacactgtgcccatttacgaaggatatgcccttccccatgctattcttcgtttggatcttgctggtcgggacctcacggactctcttatgaaaattctcactgagaggggttactccttcacaacctctgccgagcgagaaattgtaagggacatcaaggagaagcttgcatatatagcccttgactatgagcaagagttggaaactgctaagaacagctcatcagttgaaaagagctatgagctacctgatggtcaagtaatcaccattggcgcagagagattcaggtgccctgaggttctcttccagccatccatgattggtatggaggctgctggaatccatgagacaacatacaattcaatcatgaagtgtgatgtggatatcaggaaggacctctatggcaacattgtgctcagtggagggtcaactatgttcccgggtatcgctgatcgtatgagcaaggagatcacttcccttgcaccaagcagcatgaagatcaaggttgttgcaccacctgagaggaagtacagtgtctggataggagggtcgatcctagcctcgctaagcactttccaacaggtatgtattgtttatattactttcagcttctgcactttctttcctttaacaaataatatggctggagtgaaaacacttctgaattcttttatgatatggcattgatgtaccagatgtggatatcgaaggaggagtatgatgagtctggcccagcaatcgttcaccggaagtgcttctaagtttcaccagttgttgttacctagtctcaagtagtcaagttatgtccccttcatttcttgagatatgtgtggcagatttgcatgctacgtttatttgcatcggacctgagtcttctctgggatagacccttctttgtgtgttgttgcttcatgtgcggtttgtgaggttagttgtcaaacatgcttggcttgattggttgtacctctgagagctgatagttatataaattgcttggattgtgctggtgctatcaatagtcttgtatgtatctgaattctgaaagcattgttatctgagcatccgtgcaagtatgaa

SEQ ID NO: 121 - DNA, 2371 bp, Sorghum bicolor
  source 1..2371: mol_type = genomic DNA
cttccatcccttcccccggctgcctccctcgtataaaactccaccaccccagtcctgggcggcgagcacgccgccatccaggtccagccgacctgcctcccgccgccgcgaccccacaccgcctccctttgccggcggccccgtcccgcggatcggttggcgtctccccttgctgctggtatgcaagccctgccttcctctgtctgttttgtttgttttttccccccttctttcgtgctgttcagcggtggatctcaccctttgccgtgggtggtgagcgctcgaacccgaccgaatccgctggtacgcgcgctccgatccgtctagttcgtcgcggattcattcgcttaaacgcgggcggaggtttgtagctgggagcggttgatttcccgaactttgtgttaaaaaaaattatggggagtttaagtgcgacagcaaactgcagcaggatttgtaagaatttcctgcggaatttgcccagtaggactgcccttgatgggctgtgtgtgctggacacagattctgctatagtgattattagtaggagtagccctcttattatgcttgaatccgtggcagaatcactgaccagatggctgacggcgaggacatccagccccttgtctgcgacaatggcaccggcatggtcaaggttggtgctggctccatctcaccggtggtgttcatacaaatctgttgttgttgggcattcacggtactgacactggagttgcttgtgttctgtgtaggccggtttcgccggtgatgatgcgcccagggctgtctttccgagtatcgttgggcgtcctcgccatacgggggtgatggtggggatggggcagaaggacgcctatgtcggcgacgaggcccagtccaagaggggtatcctcaccctcaagtacccgatcgagcacggcatcgtcagcaactgggatgacatggagaagatttggcaccacaccttctacaacgagctccgtgtcgcccctgaggagcaccccgtgctgctcaccgaggcgccgctgaaccccaaggcgaacagggagaagatgacccagatcatgtttgagaccttcaatgtgcccgccatgtatgtcgccatccaggctgtgctttccctctatgccagtggacgcacgacaggtgatttaactgaactggattatgtgttttcatgaacgtgcattctgcagtgtaagcttcttccatcccagctggaccgacccttgttgttcctgcaggtatcgtgttggactctggtgatggtgtgagccataccgtgccaatctacgaagggtatgcgcttccgcacgccattcttcgtcttgacctcgctgggcgtgatctcacagacagcctgatgaagattctcactgagaggggttactccttcaccaccactgctgaacgggaaattgtaagggacatcaaggagaagctcgcctatgtggcacttgactatgagcaggagctggagactgccaataccagctcctctgtggagaagagctacgagttgcctgatgggcaggtgatcaccatcggggcagagaggttcagatgccctgaggtcctcttccagccttctttcattggcatggaatcacctggaatccatgagaccacctacaactccatcatgaagtgtgatgtggatattaggaaggacctctatggtaacattgtgctcagtggtggctcaaccatgttccctggtattgctgaccgcatgagcaaggagatcactgcccttgcaccaagcagtatgaagatcaaggtcgtggcgccgcctgagaggaaatacagtgtctggattggagggtccatccttgcctcccttagcacgttccaacaggtcaagattacacttctctgttgcttaaatatcaggtttttctgtgttgtacgaagctttttttcttgtcagcacactaacagtatgatttgatgtttatattggcagatgtggatctcaaagggtgagtatgatgagtcaggcccagcaattgttcaccggaagtgcttctaagccttggattcattgtctttctactttattggggcttttcttttgtcgggggcttggggccttgcatgtaagctactgtgtttgagattggggttccattgagcgatattgctggatttattggttgggtccaaaccatgtacttttaagactcttaatatgttaagtggctgctatagtcgaccagttgctgattcatacattgtgtgttggagttcggctgtgatggcaagtttggtgccagtgttaaagagtattgaactatctactagcagtccttgtctactagtatgttctgtaatatagttttcaggtgattcattatcatttctattgtgcatt

SEQ ID NO: 122 - DNA, 3536 bp, Sorghum bicolor
  source 1..3536: mol_type = genomic DNA
gccggcgcatataaatgagacggacgccgttctggcgttctccccttcccttccagagcagagcaggcacacctcaccgcagcgccctcctcgtctctatccccgtcggatccaccaccgagcaccgaccgaccgcacctctgctcgctcctgccgccacaatcgctgctcttctctaagtgctgtcgatttgtgcgttggctggttttcattcggttccatccttgtgttggtaagtcatcctaccttgcgctgagaggtgcttttgctcgtcttagtctttgattagattagagttggtttggtttcttcccagtccttggatccgtctcctttattagagccgcgcaactgtaattcttgaacagttgatgcaaatatgcagtgtcttgctagtgataagaagcagtacgtgttgtccccttcgaccaagaaggggggaaaattctagtagtagttgttcatgtgtcatagccggatcctcggagatagaaatcgatttgatatatgtggtggaggtgcatgctcctagaaatctcatctcatggtgctggactgctggttttggttttggtttcaagtagcaagtcggttacttggtggatactcgtgggaaatgaatgaactgaaggtttttagttagctggccgtgagcctacaatagtttctgtaaatcttgaggccgggttggtttagatcccatccagtggctcatacttgtgatcttcttgtgcttggcggcctaactggggtgcttactgagcttttattgggcaaaccttaattaggttttcctaataactaatataaaattatgtatcttcatgtcaaatactgctaaccctgacctgaatctttgtcaggttatattggtgtaaacagctcaatctgtcaaacagccagctattgtttttttcccctttctttttggcataaacaatccagttgataactttttgctagctggaatcgaaatgatgggcgccactactcactccttgctggcacacggactttagacttccatcgtctacggctaaatgaattatccagctataggctggatgtgcagcaacagcaataattctgatccagtacagctgtggttttattcattttgttaggatcagtagcacatgggtgagcaagtgagcatgtctctgcctgacaggacagcttatgccagcttatatagctcttagtatactgggcataatcaatccactttatgatcgatcgcagtgttacatatttttccttcaaagtcattacccctatttaccggctggtccttgttcaaagattcattaatggtaataatcttgctgcaacctgagtacctgacctagagataaggcctgctaaatacaatattgcgttccttttacttggctatcacaaattgctattaattatcaatttatcattatgtacctgaaaatcatatggcctttctcttatcaatcttaacttaaatttccaagccatctagtatgaactggttaattttttttttgtgctttaacaagtgaatatttgagatgatctctgaattcagattgtctgtgcagatcaatggctgacggtgaggatatccagccacttgtgtgtgacaatggcactggaatggtcaaggttcgatgctcgttctctctgttcattcattcatctctgaaacctgtaaaaggagttgttagagaacctatgcttctcctctctgcaggctggctttgctggtgatgatgcgcccagagcagtgttccctagtatagttggccgccctcggcacacgggtgtgatggttggaatgggccaaaaggatgcctatgttggtgatgaggcacagtcaaaaagaggtatcttgaccttgaagtaccccattgaacatggtatcgtgaacaactgggatgatatggagaaaatctggcatcacaccttctacaatgaactgcgtgttgctcctgaagagcatccagttctgctgacagaagcacctctgaacccaaaggcaaacagagagaagatgacccaaattatgtttgagacattcaatgcaccagcaatgtatgttgctatccaagctgttctttccctatatgccagtggtcgcacaacaggcacgtgttcatttcacctattaactgatgagtttttctaggacaactttatctttgcctcttgtcattggtgatctgaccccattctacttatgtcttgtatgcaggtattgtacttgattctggtgacggtgtgacccacactgtgccaatctatgagggatacgcgcttcctcatgctattcttaggttggatcttgctggtcgtgatctgactgactgcctaatgaagatcctcacagaaaggggttattccttcactacaacagcagaacgggaaattgtaagagatataaaggagaagctggcctttgtcgcccttgattacgagcaggagctcgagactgctaagagcagctcctctgtcgagaagagctatgagttgcctgatgggcaggtcatcacaattggcgcagaaaggttcagatgcccagaagtgcttttccagccgtcactgattgggatggaagctcctggcatccatgagaccacctacaactctatcatgaaatgtgatgttgatatcaggaaggatctgtatggcaacatcgttctcagtggaggaacaaccatgttccctggcattgctgacaggatgagcaaggagattagtgcccttgcaccgagcagtatgaaaatcaaggtagtggcgcctccagagagaaaatacagtgtttggattggtggttcaatccttgcctccctcagcacattccagcaggtacttactatcatggcactttccttgttgtcatagcatttatgatgttatcatggagatggtttcttaggtgccttttgatcatcttccttttttaagtgaaaccaacaatcaaccaaattaacaagtgcatgtgaacacatctaaatcagtaaattgtgaatggcaatgttccagtgatttttattgtcgccatagctttgaatacgaactaatatccactcaatttcgaagtattgttttttttttacagtatatgcttcttactccaatcattttcctgttgcagatgtggatatccaaggaagaatacgatgaatccggacctgctatcgtccaccgaaaatgcttctgagctttcagccgcacctttcgttgtgtgtcaggctgttgagatctgcattattgagtgtctttgtgaagtacatatagtttttgcgagcatgattgcatgagggaaggagtacacccaactaagcatttgcctttcatatgccctgctttagtgatccagatgctgcttcttcaagtgatttgtcgatatagtatgcgagcaatgtattggttttggctacagctgtcctgtcatgacattagctatgtatctatctatatctgcatacagtattggctatttggtcgttttccctgtgggcggaagactcgatatgatatttaagttcacagtttttttttta

SEQ ID NO: 123 - DNA, 3318 bp, Sorghum bicolor
  source 1..3318: mol_type = genomic DNA
ttgacccggcagccggcacgggcgaggtcagagagagcgagctgttggccgggtcgtccctgcgctcgccagcgctgctgtcatgccgtgccgagacacggtggcaggcggcttcccaacgacgctgggcatccgcagccagcgcgtgcagcagcagaccagtccaaccaggcgggctcgtataaagaggttcccctgttccccaactttggctgccgctctcccatttgtctcgtctcgctctcacgctcgcgtcaccggagctctccagaagcgagccccaactgcccaagggcgagcgatccgatccccttcgcagcctcgtcaacgacgccgaggtatacccgtgtttcccccttgctctcgcaccgattttatccgaggaagcgatcggctgtagacagtcggttcgattggtccccgctcgagcttcccgtcggtgttgacttcggtttttcatgtcgattttgttgtttttgtcatgtttgtttcggctctagaattcggataggcggtctgatatggttcaaagtgatccagcatataataatgagcaaaactaccgcatatgggtagtttgagtgatccagcatataacgagcaaaaactgccggcaaaaactgccggtctgtggtgtttgattggattccctgtttgtgtgatggaacttaatgtccagttactcagtcagttcgtaggtgtatatatgattcagcaatcagcatgtgctaagatatgtgctatgctgatccataacagagtagcagaacccgcaaattgctttcagatcactttgtgaagaactggaggtgatctcaagcaggtgaaaccacactgtttctgtcgatgattcagatgaaatgtgactcaaatattcagttaataattttcctcaaccaaattggcccccgtcatcctcttacccaaataggagtgtggtttcagccaattcggtacatacgtgtgatgcttgctcaccataaaaaaatgaaacatgcatggtataatggtagcagagaaatttgtggccgatcaagtatcaagataatgaataatttgtattatcagctggcaccaaagtctggtcgtctctgcgaattgcttgaaagcttatacttgtataagtcaagtatccgcttttttaacgcaaagtaaagtatcagtttcttaaaaaatgaacagttgtgcacattagttttgactgatgattgccatattgcaatttgatatttttttgtggggtttacctgactccatggacactttagtgattaacaccgctgcagataaactcaaatacattctgaatatagcattctgctgcagaacactttgaggaatggctgaagaggatgtccagccccttgtgtgtgacaatggcactggaatggtcaaggttggttctcttgtctggctgtcaattttttagctaccactaccatacatttgtttcagtttccttttgcctgtttattcatttctgatttaataaactgatgggatcttgatgccaaacaggcaggttttgctggtgacgacgcaccaagagctgtctttcctagcattgtaggcaggccacgccacactggtgtgatggtgggcatgggccaaaaggatgcatatgtgggcgatgaagctcagtccaaaagaggtattctgacactgaagtacccaatcgagcatggtattgttggcaactgggatgacatggagaagatctggcaccacaccttctacaatgagcttcgtgtggcacctgaggagcaccctatactgctgaccgaggctcctctgaaccccaaggcaaacagggagaagatgacccagatcatgttcgagacgttcaactgcccagcaatgtatgtggccatccaggccgttctttccctgtacgccagtggtcgaacaactggtatgttactgcattaaacctatttcatgtcagcattgagatagcagtgtagtgagtgacaacaatatttctgcaggtattgtgctcgactctggtgatggtgtgagtcacactgtccccatctacgaagggtacacgcttcctcatgctattcttcgattggaccttgctggtcgtgaccttaccgacaacctgatgaagatccttactgagaggggttactccttcaccacgaccgccgagcgagaaattgtcagggacatcaaggaaaaacttgcctacgttgcccttgattatgaccaggagctggagactgccaggaccagctccaccgttgagaagagctacgagctgcccgatggacaggttatcacaatcggtgcagaaaggtttagatgccctgaggtgctattccagccatccttcattggcatggaatctcctggcatccatgaagccacgtacaactccatcatgaaatgtgacgtcgatatcagaaaggatttgtacggtaatgttgtcctcagtggtggctccactatgttccctggtattggtgaccgcatgagcaaggagatcactgcacttgcccccagcagcatgaaggtgaaggtggttgctcccccagagaggaagtacagtgtttggattggtggctccattctagcctccctcagtaccttccagcaggttgttactgtctcaaaatctaaatgcgaagtttctgcttgctttgcagttctattgtataggaaatttgatttattgttgttattgttttgtagatgtggatctccaaggcagagtatgatgaatctggtccgggcatcgtccacatgaagtgcttctgaatttctggagcagtttatctgttacttgtattttcagttaattgggatgcaagattgtcccatggtttctctagcattcttggttctttctggatcattgaagggctgttgaccatggagtattgtgaaaggtggtaaagtcgatcgatgttctacatgaagaaacatgtgcattacttcagcagtatagatcgtcaggtcagtttagttttttttcccccaacagcaccatatcagggcgttcctgatgtgtgcagttgatctgggtttttacacgacgcaagggtgtcggctgtcgcccatgcagtttgagtctttgagagcttttggtttctgcacttcagtacatggaacagagttcgcatttggtggccagcaccccagcgtggcatgggtgtttgatgatttgtactcggagctgtttgttttattccttttcatgaaacaggtgttattgtttgtatagggataaattgtttatccttcaaatgtcttagatactgttggatcaaacttcatttataatcatataatgccttggatttacttcgagta

SEQ ID NO: 124 - DNA, 3381 bp, Sorghum bicolor
  source 1..3381: mol_type = genomic DNA
gtccgtgcgtttccttttgtttcttgctttgcttcttttcgagtgcttgccgtccgtcactgctcgccgatcgagttttctccggattccagcagagaggccccgaacgaagcgatcatcgccgcacctctcttcgagcaggtgataatccctcttgctcttctgttccatctcaaattctctgcggaatcgtactagtttttatcccccccgacagatcgcctcgctcaccagtcgccaggcttccgattggtggtgtctggtaacttttttttgtggtttctgcgtctggcgctgctgattccccgtggtttcggttggtttgtggcgatttctttcaagggcaaaggaattccctgggatagtaaggcgtgctgtaggctatggtaggattatgctacggcgatggcgccgtgccgccgtcagtactgaaacactactagtataggtcacccgctgtcagtggcgttggtgagttttttttttttgtttttgtttttttttgggtaaaacagcgagctacgaattaactggttgctgaaatacgtgtctcgtatctcttcgtatggttactccgcgccaaacaaagaaattaggattgactttcagattgtagaggctgctgctatatatggagctcttcggttccctgttggtctctagttgcctgggcagggcaggggtagtagtagtagtagtaatttttatttttatttgaaatgcccgtcaagagttctgccaagcatatattgatagagcagggataatactaattttattgccgtagtgcacagcagcagcagcaaggccagattgtgtagagacagttcttgctgttttggcaaatacccccagaagttagttcctgtgaccagtggtgatatatgatttactttagataactcagctcatcgtggagcataatttgtctgacacagatctacatttatacgcgaatactgcgtatagaagtatcttaggctgttgtactcccgtagtagctgtgtagaagtcacaagtaaaggaaagacaattacagaaacagaaggcttttccttgaaccatgagcagaaagtgtgttttgattcccctgaccaggcttgatgactattaactagtactcaattactgcagttttctctgaatgtgtactgaacgctttctctgaatgtgtactgaacgctgaacattgatctctctgttacagaatagttgagaatggctgacgaggatattcagcctatcgtatgcgacaatggcactggaatggtcaaggttgttatctcgctcaaaagtctcttcaataaagcaattatattcctgtggacctaattgttgtccaacttcttaatatttacaggccggttttgctggtgatgatgcaccaagagctgtcttccccagcattgtgggaagaccgcgccataccggtgtcatggttggcatgggccaaaaggatgcctatgtaggtgatgaggctcaggccaagagaggcatcctgacactgaagtacccaattgagcatggcattgtcaacaactgggatgacatggagaaaatctggcatcacaccttctacaacgagctccgtgttgcgcctgaagatcaccctgtactgctgaccgaggctcctctcaaccccaaggccaacagagagaaaatgacacagattatgtttgaaacctttgaatgcccagcaatgtatgttgctatccaggctgttctttccttgtatgctagtgggcgaacaactggtaagataattgtcgcctcagaaatagtaatatgcactacaaaaatcatacggtaaatcctgacacaacctctttctcaaatgtctctgtgtgtaggtattgtgatggactccggtgatggtgtgagccacacagttccaatatacgaaggatacacacttcctcatgctattctccgtttggatcttgcggggcgtgacctcaccgaccacctaatgaagatcctcacagagagagggtactccctcactacgagcgctgagcgagaaattgtcagggacataaaggagaagctcgcctatgttgcccttgattatgaacaggagctggaaacagccaggagcagctcctctgttgagaagagctacgagatgcctgatggtcaggtcatcaccattgggtcagaaaggttcaggtgccccgaggtgctgttccagccatctcttgttggtatggaatcgcctggcgtacatgaagccacatacaactccatcatgaagtgtgatgttgatatcaggaaggatttgtatggtaatgttgtcctcagtggaggatctaccatgttccctgggattgctgatcgaatgagcaaggagatcacgtccctggctcctagcagcatgaagattaaagtgattgcaccacctgaaaggaaatacagtgtctggattggtggctctattttggcttctctcagcacttttcagcaggtaggcttctctttattactttattcctataagtagtaggcttttatcattcaattattcatgagaacttacagcatccttgaccatgtcgtttttttagttaaagttcaattatataccaacttaacttaggttaaactggcagggtatgcactcttcttttcccaaaaatgcaattggaacacaaataaactcatgttgtcgagcatagacgatcaacttctcttcatacagacatagatttcaatgtgatagtaacatatttttgaggaaatgaaaagattttaagttctttttcttcacaagatataagctggatgtggaaatggaattactagggtgatagcactgaacattttccatgcattgccattccttccacttgttttattttaattccatttcaactctttgacatgggcaactgtgttgggctgttggcagatgtggatctcgaaggcagagtatgatgaaaccggtccaggcattgtccacatgaagtgcttctaagtttttctcagacagttttctaaaaaaagggcgtttctggggaagttcgagatggttcgtaaggtgttactggctcctgtgaaccaatacatgatactgccatgataagggttataattagtcaagcagagtaagaagaaataacagtagcagtgactccgattcctgaagatgagtcatatttgtcttgtgctcctgctgtatgaaatggatcgcatgtgtatattcgtcgccgcgccgcactggtgtaacctgttgcctcagagtttgcttttagctggttctgttttaaaaataagtactgttttttggttggctgcaagccattctgaacttcagtttaccaattgtttttatgttgtggttgaatattttaattttttatttaatgtttggttcttttttta

SEQ ID NO: 125 - DNA, 2695 bp, Sorghum bicolor
  source 1..2695: mol_type = genomic DNA
tcaaggagaccacgttctcctcctcctcctctccttcacaccacagacagcccccgactgccacaagtctctctcctctcctctctctctctctctctctctcctcgcgacgactgggcgagaccgccgccgcccttcgccaggtgcccaggtctccgccgcttccttcgccggaggtcaccaggttcgcctgcccccttcctttcccttggtgctgggcgaaaccgatctcccaaaccgtatcttaggcttcccatttgtgtactcgcatccagatctgatctagttacacgtatagcatgcttgcacccggatctaatctagttagaagcgtagtgaacttgcattcggatctgatctacagttgcatccggatctggcgtaaaagagtttgctagttttcttttacgaattggtctaagctaactggatgcttgttgttggtgtgattccagtgaagagcagttggtctttcgtccggaagtagacttccaccacgcatattagcttactggaatatgatgttgcaaatttcagatgctataagtcatgaataaattgttttctttgtgtgaccttttttctgtacgaagaatgtgatttactgctcaattggcacgtgtatccgaatcacagtgttcctttcaatcaatcatatattgaaaataaaaaaaattaatcactgatggattctctttatatgcgaacctgcagcagttctgtagaaatggctgatggtgaggacatccagcctcttgtctgcgacaatggcaccggaatggtcaaggtcagtccatctcccccttagcttgtacaacctttatctcctgtctttccaaatatgccactaatcatgtctgtttatctatcttccaggctggttttgctggtgatgatgcaccgagggctgttttccctagcatcgtgggtcgtcctcgtcacacgggtgtcatggtagggatgggacagaaggacgcgtatgttggcgatgaggcacagtccaagagaggtattctcacgctcaagtacccgattgagcatggtattgtcagcaattgggatgacatggagaaaatctggcatcacactttctacaacgagctccgtgttgccccggaggagcaccctgtgttgctcactgaagctcctctgaacccaaaggccaacagggagaagatgacccagattatgtttgagactttcaatgttcctgccatgtatgttgcgattcaagcagtgctctccctctatgctagtgggcgtactactggtatgacctgcttctccctttacttcggtgttgattcagcttcttactaataatatctctatcgttccattatgctattttcaagtgtttatctgaggctattgtcaaggtcatatcaagccaccgggtttctttatcttctttctttgcttatgagatttcgtagttcagatatgcctcatatgtggttaccagctcagtctgtacagtgatataaattcaggaaaaataagtatctcaactaatataccaagagtaaaaatggaagttaaaaattttgtttacactctgtggctgaagttacctcttttttttttccctctgtcaatctataggtattgttctcgactctggtgatggtgtgagccacactgtgcccatttacgaaggatatgcccttccccatgccattcttcgtttggatcttgctggccgggacctcacggactccctcatgaaaattctcacggagaggggttactccttcacaacctctgctgagcgggaaattgtaagggacatcaaggagaagcttgcatatatagcccttgactatgagcaagagttggaaactgccaagaacagctcctcagttgaaaagagctatgagctacctgatggtcaagtaatcaccatcggtgcagagagattcaggtgccctgaggtcctcttccagccatctatgattggtatggaggctgctggaatccatgagacaacatacaattcaatcatgaagtgcgatgtggatatcaggaaggacctctacggcaacattgtgctcagtggtggttcaactatgttcccgggtatcgctgatcgtatgagcaaggagatcacttcgcttgcaccaagcagtatgaagatcaaggttgttgcaccacctgagaggaagtacagtgtctggataggagggtcgatcctagcctcactcagcactttccaacaggtgtgtgttgtttatattactttcagctgctgctttttatttcttctaactcataataatatggctggaatgaaaacacttctgaattttgttatgatgtggcattgatgtaccagatgtggatatcgaaggaggagtatgatgagtctggcccagctattgttcacaggaagtgcttctaggttttctcatcgcctagtctcaagttatgtctcctccatttctcgagacacttgtggcagatttgcatgctacctttattttcatcggacctgagtcctctcggggataggccctcctttgtatgttgtggctccatgtgcgagcacgccgtgtcgtatcacctggtttgtgagatgagttgttgtcaaacttgcttggcttgattggttgtacctgtaagagctgatagttttataaattgcttggactgttctgctgctacctatatagccttgtatgtattctgaaagcga

SEQ ID NO: 126 - DNA, 5807 bp, Sorghum bicolor
  source 1..5807: mol_type = genomic DNA
tcaatccgacggtgagagctgttgcggccaatccctcccgcagtctcctccgtcttgtccggttgtcccctcccgtaccgtaccgtagcttggaagcgcagagagacagggagatcaccacaggtcccaagacccagaggggaggaggaggaggaggaccgccccgaagaagggagggaagcgcgaatggagagcaggaacgtagtggtgtgcgacaatggtaccggggtaagtcctcacctccctgacccaccccatctccgctcaattcctagatccgccgcccgttcatgctccggatcacgaccgagtttctcgcgtactgccccagacacaatccgccgctgcttcggccactgattggggggaagccggttcgagagtcgatcgccggtgccggggcgggcgggaccggagtgcctggcacggctggacggaggctgggagccatgaaggactgaaaaaagcgagacacggttgtttgttggggcatcggtcgcggtagttaggcagcttaggggcgttagggcctgtttgcttggctgaaaagccatgactcaaagtactgttcgctgccgcaatcgtgaattgctattcacaaataatggcgtgctcggttgttttgacattgttcacaagacaaagcttaggttaaccccaagtacctgcaaactatattcaaaattgctggtgaaatctctagttgttgtgttgacagtgtgtttgtgttaagttcctttgtcttcattttttgttattttaaaaagcatatattgtttcatgcatttcagacctgttgtctgtacaactatgtaattgctagatatattgatgcacagaagaaaatgtcgattgagcctgagatttctagtacaagctaaattcccattatcctatattgccatgtacatgtgacatcctgctgaaattctggtggagctcaatctgttctcagttttcgccagtgccaaataatcatatgggaagatgcgaggcttgttgagtctccgataataatgatgaaatgacactgagccagattacaaagtggatcattcctttctctaatttgacaccttttgattgcagtatgtgaagtgtggctttgctggtgagaactttcctacatctgtgttcccttgtgttgtcggaagacctctacttcgctatgaggagtcacttcaggagcaagaattgacggtccgaatctattttcttatcatctttctggaacttcatgttcatgagtacatcctatgataggcgcttgtgttcgttacaggatattgttgttggagcagcttgtgctgacttgagacatcaacttgatgtatcatatcctgtcaccaatggcattgttcaaaattgggatgatatgggccatatttgggataatgccttctacagtgagctcaaggtatatctatactggtatgcttaaccctgcgtgtaatgccttaccctttctctggaaagtattttcccctgatatcctttattatatttcctaagtttcctagttctagttaaagcgacacctttctattttcttcatttaggtcgatccatcagagtgtaaaatcctactgacagatccaccactcaatcccgtgaaaaaccgagaaaaaatggtatggcatttccttttatcaacttgtcacatactgccagagctgtagtttctaacatcaatgcctaacaaattgaatcccatgaacagatcgagaccatgttcgagaaatataattttgctggggtcttcatccagatccaagcagttctttcgctgtacgctcaaggtcatctctccctcctgaccatgtgctccagtctggggctctgggcattcacacaggcacatacaatatcacattaacactccactttacatgtttcaggcttgctaactggacttgtgatagattctggtgacggtgttactcatgtggtatgagaataatgttcttccctatatccgaccaagtattttggtttgaaggggtacattcaatttctaatcatctttgtgcaaccaactcaaatatcatggtaatcagcaacatattaagcccagaacaccataagatggcattttaattagtatgccagtcaatgatttcagtatgttgtatgaaagtgtttagaaattaggcaactacaaatttataaaaattagaaatcaattacatatgaatagtagtaaaaagatataacaactatggggggtccccaacaggatcctcactcatacggggaccagatatgagtgaggcgattacatatacaccagggttaaacacatagtgaacaaacacaactcgaccttaactaaaaggacctagtctgcgagtgccaaatcaagtccttgaagcctcttcgcccccgccatacaccagaggctgtgctcattcttcaactcactccagatcatgctaatcaaaggagaagccccctcaaaaacacatgcattcctatgtctccaaataacccaggcccctaaaataattaaagacttcactcctttactgtgctccttggaaactctgcttattgtcttgcgccaccagtcagcaaaactcaattcattttgttgtgggactaaattcaataggttcagaggagtgaataatttgaatcatatttgtcctgtcaccacacatgatgttaacaaatggtatattgtctcaacttcttgatcacaaaggggtcatttatcaggatgagagaggcccctcttggagagccgatctgccgtccaacatctattatggattgccaaccacaagaacattttgcatttgctcggggcccaagtcttccatagacgatgccaaggctcaaaggtcacagcaccacaggaaaaaggctttataagcagatttggaagagtagcaaccacttgcatctagtctccatatatggcgatcctcttgatcagtcaaagaaaatcccatgaggcagtcccatagctgtaggaattccctaatgctagtccaggataggcctccttgtcagatgctcttttcagcatgcctgtttgatattctttatgttatttgcttttattttctttttctacaactatgtgatttcggtcatgttacaaaacctgtttccatttaggatgttaagtttggaccaatgagcaatcgtctttatccctgtgcttacatgtgactcatttaacaatactgtgatgtgattgtgaagcttttatttttaactaaattacttccactttcaatcttaattttgcacctatcatctttttcatgcattcaggttcctgtagttgatggatactcttatcctcatctgacaaagagaatgaatgtagctggaagacatataacctcttatcttgttgacctactatcaaggagagggtaagacctatcttgctctgaagattgtcttctgcagctgctgctacatgatttttctgattcaattagttctcccactttaaaaggtatgctatgaacaaatctgctgactttgagacggtcagagaaataaaagagaagctatgctatataaggtaacttgtcttattgttcttaattattgtctctatcttgctgttgtatatgtagtcatgacagttaaattatgtacagctatgattacaaacgagaataccagctaggacttgagaccacaatccttgtgaaaagttacactgtaagtatgttgccctgcttgtaatttttccctgttccttttcttattgtaagctcagttcttgtgatcagcttccagatggaagagtcattaaagtgggcactgaacgatttcaagctcctgaagctcttttcactcctgtaagactattccatttctgttcctgtttagtattattgattgcagtatgcaattgtgtcgacaaactctgcaataagctagtattcaccaaatattgatttaacaggaactgatagatgttgaaggtgatgggatggcagatatggcattccgttgcattcaggaaatggatatcgacaaccggatgacggtatacatatattaccagtacagtacattgctggttcaacctttcaattgttcaaatgaaacatggattagaaggaacaatgggttaatatttttctaatttagttcttatgatttagggcactggtggattcaaattttatgcttgaccatggttgtatataaacagtatagtgcttaagtttatttagaatattgaatttatttaaatttatttgatgttgatgttctggacttaagttagattcaattataaagagtctgagactatattgaaatatcaactacgtaagattagatttcctatgctttacattgtatagttttttaataggttcatcatgtccttttttttcttattataatatatgaccatgtttcgcagctctatcaacatattgtcctgagtggaggaagtacaatgtaccctggtctaccaagtcggtaagactctaattccttttgaagtctgtagtcatgaggatatgctcgtcttaatttatgtttttttagtttactgccagcacggaaaaattatgtgtgtgaaacaacattatgcgtaccaattgtttttattttggttcgagccctgcatcctcttaattaaaaaacggggttgtggtctgctccttcccgtcaagttatttttttattgtttttattttgatagccttcttggtagttgtcatgtaagcacatatggatattgttatgataattgcctgtaatgtttcttatagcgattattttcctggttaatataagcctctacccgagttgcatatgcttaacaagttactacattttgcaaggttggagaaggaaattcttgatcgctatcttgatgtagttttgaagggaaacaaagatggcctgaaggtaatatacatgcaattatattttttatgtcctgaaggaaattgttgatcgctagccgagttgtaagattgttgatgttctaccttgcattgctgtaatcattggtccgcagttgttattcttgtctgttgacctctacaacaaattctgttaaataatttgcgcttcctttcttacaaataggagacataagtgcataaaattattgaactcagacagaacaatccaaatacactttctgtaaaggatatgcattcatctcagtattagcatctgctctctgtttccatctgtgacacattcgctctcattgtgcatagaaattacgactgcggatagaggatcctcctcggagaaagcacatggtgtacctgggaggtgcagtgcttgctggaatcatgaaggtaattcttgtatatgtgctctcatgcagaatcttattacactgatggattgctagtaatatacttcctgcgtattgtttggaccatgcaggatgcacctgagttctggataaccaggcaggagtatcaggaagaaggtgtagcgtgcctaaggaagtgcggacagtcataagtcgcaaccgtccaatcctaccacagaagaaatggaggggctcccgatgctgacggaaacaagggccagagcttacaaagccggccatggttcgctcatgaagcgaaggttacatgtgtaaagaagagctcagcactacagctttgttgttggtgtatattgtagtgagctgtcctgaacatgctcgggggtaatactgttctaggggatcatgtttgtattggctactcaattcgacctctgttattgatcatattgtcaagttttagatatggaacttgaaggctacctttatttgtattttttcccgattaatttcatgaacctgacaaagtcta

SEQ ID NO: 127 - DNA, 5544 bp, Sorghum bicolor
  source 1..5544: mol_type = genomic DNA
gcccgaagatctaccggccaggaccaaagcttcgtcgactccctcgtcctacctcacctcctcctccgcttgcttctccgcgatcctcctctttcccgcgacttcctctttttcaaaaatcctcgctagtctcgtgccccgttctacccacctctaccttcgaatcctagcgcctcgcctccgcatcctagggtttgcccgcccccgccgccggccatggacgcggtggtcgtcgacgcgggctccaaactgctcaaggccggcatcgcggcgcccgaccaggcgcccccgctggtgagcacacggatctctggggggcgcctctcagtgcgctgtgtgtgtgttttttttgtgagttatttgacattctattttcttgtggggccttttgctgggcaggtgatgccgtcgaagatgaaggtggatgtggaggaccaggagctggccgacggcgccgtggttgaggaggtggtgcagccggtggtgcgcggcttcgtcaaggactgggacgccatggaggacctactcaactacgtcctctacaggaacattgggtgggagattggggatgagggccagattctcttcaccgaaccgctcttcacacccaaggtgatgtatctccctgctcgaatagagcttgatatgcttcatgtttcggccttgctgatgtgggggtggctagggtatccaatcgtgaccccccaaattgttttaggacaactaaatttgctgaattactaatcgactagtggggcttattttttggcatggcttataagtactagttattaattaggttggggtattctggacttgtgtcttgaactcgtgacccaacatttttttttgtttttacatgattgtttttggagtttcatgatctcaaacatgactcttaattagatggtcatgccatatgtactctaaactttgatgtcaaacattttgctatattggggatgtgtgtgcatggtggatttaatgatctatgtggaagttgataacaatagttaaactatataactgaatttggtagtccttttcataccagagctgaaatgatggaccccgatattttgtggtttctgcagcctatgtgtaaggtcactgcaaatcttggtgttgtataggatctgcactagagcttactagaaagttgaagtccggcctccaggtcaaatttggtgtgcattttaatttaaaaattcgaacaagctaagattgaatcaatagtgtagtgtatctgtgtgccagctacaaagtattcaataatggtacctggtgggcttttctggtgtgatgttttgcagatgctggcatcatagcagcacatgtttggatattgtctcatgcatcttctaagtaggctttggacatatgggagctgcaaaataatatatcttgtacttaatttttttgtcttccattgttcatgttctgagtgtgtctaatgcatttctctagtagttcttttgtacatttgaaattggttataattgtcttcacatctcttaatgctctctgcagactcttcgggagcaattggtgcagcttatgtttgaaaagttcaatgtttcaggcttttatgcctctgaacaggctgtattgtcactctatgctgttggacgcatttcaggatgtacagttgacattgggcacgggaaaataggtaatatcgcaaattcaaagcatctttaactttggatgattcagatttcaattatgtttattccacatctggattttgtttgtgtagcaatggtctgaagctattgactttttccttcatttatttcgataaaagagccatcctttacctgtagattttgactctgttaatgtttaattcagtcctcttgtcagctttcactgctgtagatttctttgatgcaaaccagcacatgtcgaaggcttgcagggaaaacatatatgttcccttctgagctcaaaagttgtgcaatagaaagaaaaggtcaactagtgattgatgatctttaaggatacacaaggacatcacatgtgggtgacataaattctttatgcaaacaattttcaggaatgtttatattacaatacaaatatcaaaacttcaaaatgttatgggctttatgcaattaattaattaatctagtctcgtgaatgaaccatggtttgtgtcatactgttgtaatgttgtgctggttttatttgtgtatctttgccaatattttcaaaggcggcgcttagctccaccttggcgctaggtggagctgcatcgcctcacttggcacctaggtgttttgtctaggcttttttgtgcatagaaatgtttgggcttgacgtatgcttgaaaatggaacatattagagatggaggaagatgagctgcagtcatatcactcatggatgtatgataatttaagttttttagcaggattattctaatcacccacataaattacatacgcttagcattgcataggcactagacatagcccgatcgcctgtctagcatgtagcacttttgaaacactatttttttgcatatagctgtgccacaattctttcacctaatcatcgtttgcctttctacaaagatgtattattgcattccttgctcgcagatcagtctttctgcaggttcttaaagtaaacaattaccaatatttctttttcaacttggttgccatttgccaattaagtgtaaagatgaaagtaaatgtagtaagtggagtttctgataagaagctatttgagaaaacaatacttattgcatatagagattgaagatataaaatgacaatggaatcattttgaaaaagtacttacatattataaatagtttcataaatataacatagatagaatgccaaagttgcatctgaataacaagtggatgcctagaagtacactcttcccttaccaaatgagcacattatattatgaagcctcacacctaacaaaataaccaaaagatagtagtagtatacctgaagaaacagtgcataatgattacacctgctccacatcttctttttaaaatcttgttttctcaggtgccagtgactcccagggtatgcatcatagttatactcgtcaccattaactccgttagcacagcaaaggaacagggactagaagatttcttaagctatggttcatttacgggaatgtgactgcatgtttgtgctttaaaattgtttatacctgcatttatcttgtgattgttatttctttaatctttcaaagctcttactcatttttggcgatttgtttagtgtggcatagttgactactttgcaaaagacacacagcataacaagtcttttgattggctagctttaactaaagtagacattgcctacatttttggttgagttatggccatccagtgcttgttttacttcactaattagtatgtactcccactagacccttttatatagtggtgtgcaagcaaggctgatgttggagagtgtcatttgcttctattttaccagatattgctccagtttgtgaaggagctgttcaacacatagcttctaagagattagagattgggggggttgacttgacaaacctgtttgcacaagaactgaaaaaatccaatccatcagtaaaccttgatgtttctgatgttgagaggctgaaagagcagtatgcatgttgcgcagaagatcagttggcttttgaagctataggaagctcttgccaaccagaaaagcacactcttcctgatgggcaggtaggttattatacattgttttgccgtaaatcttctgtcaaacatacattcctctcttattgtgtgattgattttctacataaatgcatgattattgtgtccttgtctcttttcttgcttttattaggtccaaataaagtgatgaatctatacaaactagtcttttataaccacttctttctccaggttataacaattgaaaaagagggatacattgttggtgaagctttatttcaaccatgtatattgggcttggaagattatggtatcgttcaccagctagttactagtgtctcaaatgtttcatcagagtaccatcgtcagctgcttgaaaataccatgttatgtggtggcaccgcatcaatgactggttagttattgatttcatatgccagatgccttttgttcttgatgtgcacttttatattattcaaccttgtgagctatatgtcaaatgcatatttattagctagatagggtaagtaatatcattttggtttaaactttcgtggatttaacctatgttttctagttgaacacagcttcattcaagatgaaaatctgccttaggtatgaactgattgtgtggatgccaacctatgcaccactagtctggtacattctctgttgttatgttccctaataaaaaaagtgtcagctttgatgttctgttgaactttgaagtttcatttgatggttgctctttggataagtagccaaatattatggcaaatatggataggcttgagtagtcaaaactcaaatattatggtgaatatgggtagcaatagcacaactggaagtggaaagtatgttggttaagtaagaattgggttgctgaaactgattcttgatattgaaataagcatttatcgcacagctacatttcatcatggttacagctttgcatgttcaattggctctcttgggcagttgtgtatacagcttgtccatctttatgcataattaatctaaactcctgtgcttagactcatttagtcactatttcttgcctcaaggctttgaggacaggttccagagagaagcaaatctgtctgcttcagcaatctgtccatcacttgtgaaggtaccctcattgctgctcctagtcaattcccatctcacttgcctggctattactaacttaaacaatgtttcctccagccccctgaatacatgcctgagaacctagcaaggtactcggcctggttgggtggtgcgatcttggccaaggtcgttttccctcaaaaccagcatgtcaccaagggcgagtatgatgagacggggccgtccattgtgcacaagaagtgcttttagagacaactaccttgaactaggacggttggtgcaccgtttgctgctgttcatgtcacaggtgtgctcatacctgaatattgcaggtgtgatgcttgtgtgtacaccttattccagccacagttgatacctgactgttgcaaagtattgatgcatctagctcggttaggctgttattgcccctagggtttattcagagtgcaatagagtgtaacatcgacatgtatttgttaggagttttaggcaattgcccatttgtacctgtagtatcagagaatttgctgagatttccttttcaatttacattatgatccattatctgttcagctactacttctttggatcatgctcacaaattaagcgcgtcacagttcaggccacataaattgtactcaagctttgttagcgcggcaccccatgtcatagatcctttttttgggctaaactttgtaacaggtgtggtgttcaatttattcgccacacttatttgtggctttcgcttta

SEQ ID NO: 128 - DNA, 7705 bp, Sorghum bicolor
  source 1..7705: mol_type = genomic DNA
gccaagtaagcccaaacacgtgaagcaaaacccctctggcttcgccccctcggctccgctaggaacctctccctcgccacgtccgtctccggcgagctagggtttgcgttccccgcctcgccaacccacggctcccgccctccctggatctccagccatgtacggcggaggtaagctctctcaccctcccccagccccctcctgctcccgctaaaccctaaacccctggagatctcacgcgcccaccgctcccttctgcctccgcagacgaggtttcggcaatcgtcatagatgtgggctcctacagctgcaaggcgggctacgccggcgacgacacccccaaggccgtgttcccctcggtgagacaaatgcttatctgctgcttccaaactcgctctgttctggagtcctttccgaacttcttttctagagggtcacagtctggaaacttctaaggtgtctgtagctgttaggtgtgaaatgcgcttctaggaagcttgtactgcactggagttggcgcactcgttttgattgactgaagcattttaggttgctcactctagaaaagaaaatggttgctggcaccaaatgttaggttcaaacatgacagactaccacttcacttgggttgatgcaggtgtatcctgtgtttgttttacaattttaggtgggttcggctcaatttctgacttaaatgtattcattcatacttctttatcggctatcgggcaacaaagttggttcagctttatgtttgctgcaagccctgtggtgtagcccaaacggtgactagttgtcagtattgcgctattggctctctgttgggtatcgtgcaggtatcttcagtcaagtcatataacgaacactataagatttgaatgtgctgggagcttttgcgctactgttttttgttggcttgcctcctattggttgtagaggctaattttagatcccatggaagtgactgatagtctaaagcacatcttctgtaccagttcttaattaggaaatttttcttctcttatcctagtttcgaccatgtccatgttgtgacgctatcccctatagctaatggacctaattagttagtactgcattctgggagtaggattttagatacactactctgttgagaagaatgggaagacagcgaatatgaaaaactcacaaatgttaaggatttaccatgttgtattagcagcatcaataaagaaggtttcagagttgactatttaatatctaattcagcacagttgccatggtttataaatcctattgtgttgtgagctacctataacaaattcttactgtgccttttgacatgtttagtgttgtgagctacctataacaaattcttactgtgccttttgacatgtttaggtcgttggttcagttgaacaaactgaaggcatggatgaccccaagccagagaaggaagctgactctgcatcagattctaagaatggggccaagcctatggatgtggacaaagccaaaacaaaacgcaaactttatgtaggccaagagttggagttcaggagggatcacatggaggttagtatttgcacatacatagaattaacactcataccataactttgttaactatgttttgttgatggtctttcacctactacccatgcaggtgatttcacctatgaaagatggaacggtaactgattgggatattgttgataatatatggaatcatgctttcaggtgaattttgttatctatttcatgtgtttctgagaagtttctgctctttaaattaaattgtgatcgtattctagggtattatttgaatctgaacattgttaattcttcactcttgctactttctgttcacctggcccagtgtgctggttgcatgtgttgattgtgaaatctcctgctatgtttgctaataagatacaatttgttatttttctggcttcatttaattgatggggatggtattatttctccataagccaatgctagctaaattaggattttcaatttctgacgtggttctgtaatatgtataagacacttatttctttgccttttactgtccacctgacttattccacatttcagacggaggttgttgatcaatcctgaagagcatcccatgctcatagctgaaccatctacaaacactgctcaacaaagagagaagtatgtgcatgctttgtatttaatatgtttgtgttaccaaaactttgggtgatagagcagtactacttgtttcctatttgtgacagacagttttattaaccaggacctgattttctatttgctattatggatttgactgcaaatattgctatcgttatggttttgactgcaaatattactatcattatgccttttcacctctagcctaccccaaattgcttgggacttaaggctgttggtgtttttttttggaataatcatgttgatatatctgtcattcgcttatatcatggcagaaaggttttaacaacctaattttctctgggatatgatttgctaatggatttttggaatatggatttattatagtatatccaaaactatttttgtaatgaattgatatacagtctttcattaggactccagaaaggcttaatacattcatgtctgacaaagttttccatgttttcatagagcagcggaacttatgtttgagagctacaaagtgccagcactgttcctagccaaaaatgcagtatgcctctgtcatgattaattcctgttgcaatcattttattattttttgattgtcaattgtgctatcaggtgctcacatcttttgcgtctggacgagctacatctttggtggttgacaggtgagcattttcttcatttcattccactaagcagataccttttctcgtatgaaacaatagctccctttgctcatgttagattggtgaattcatgaatgaatgcatcttcctttgctgtctgcttccattggttcttcctctttttttaatatagaatatacaaaactataactttgcatcattagttaggcacagttgcacaggtactattagtccatcatctactccatggaaataaaataatttaagaaactgaaagttgatgctctgtaacaacagattctataccgttctgtgcccttactatgattgtcatattggtttaacgtgctagttgatgattgagttgattggcgcttttgagcttttaggtgcagccattactgttattttataattttggactgtctcaattttttaagtctgccatgtgtttgggaccatttttcaccttagtagccacttagcccgtttaaatgctacatgttggccagccatgcttgtcaatttgcagtctagcccatttagccatctaaatgagaggtggccaactatttaacgtttttggttgagcattgtttgggacaaagctggtgtaacaatattatgattggttcagtttgtcttattcccgatggcctttgggacttcttcatgagaaacatagcgaatatgataatgtggccatttttggtgcagtggtggtgggtctactgtggtttctgctgtgcatgatggttttgttttgcaaaaggtacgttatacttttcataggtgataggctgataactatctgtaagagaaaaatgtatgatgcaatactttacgtgtctagttatatttcttttgctttttgttcagtcaattgaaaatatgaacaaccaatgcttatctagtatttaacaacacttcaatcttaaattcttatctacacaaacatgatttgtgattgcagtctgtggctacttctccagttggcggtgaatttttaactgactgtatgatgaaaagcttggagagcaagggcatcgttgtaagcttctctcttgcaattttgcctcttgtttaatactagtttttgctgccctgttcactcctgtttgtttactatccagattaggcccagatattcatttaagaagaaggaaaccagtcccggagaatataaggtgctatttctttgtaaaattatgtttgatattaaatcatttctgtctgctttctttcaaccaagggaaaactcaacataccactgaattgtacccctttattaatacataatatattgctatgtcacatgtaagctgatctaccaatatgcttgaaatactttagcaagactttaggggcttgtactttgtgtttgttttttaatggtgtgttttaaggccctgctgggcttgtattgtattttgctcttaatataatgatgggcaggtctcctgctggttcgagaaaaaaaaggaagactttatgggcttgttttcatagttagagatgcaaccaatgcaaaaatgagatagccggaaacaaacacaagctctttattttttgacttcattagcagctcaaattaggtgttattccaattatgagtcagaaatatcagctttggattcattcaattcaatctggaacttgtttcatacctggtagccagtaaccactatgtcagcaaatccaagtaaaaacaatagtttgaagttctggatacagaccccccccccctcctcctctctgatgtatcgcttaaagttgtttggagtttgtgtgattattttagtttctgttctttgcaattgggggcaatcacaaattctgtgatggttttcttactacttgtcccattctgaaggttttaatatgttattcgtgcttatgtataatgtcttgttcatttgactgctgtatttgcttatctttacccctatactacaaaaatgtttgcactatgcctctttgcaatacagagcgctgtcctgtaatggttttgattacagccagacaacatgtactttttatgtgagtttatgtttgtccttgtttcagattgtagatcttgatcttccaaacacaactgagagttacaggttgtactgcatggtatgttcttttagttttttctgtatgcagttgaaacttttttttttatggtttcaataatgatccgttgtattacagagagctattgctagtgacgtcaaggagtctgtttgcagagttccagacactgcttttgatggtatacaattgttgtaactgtaatacttatttagcagttatctttggtgttatttctattgtaaattcaatattcctttggtttcttttatgtgtaccttgaatgcaacataaattatatttctttcattcacttatgggttttaaacctttttctttcattacatttcctgttatgttatagcacttaatttcccagctttatttttcatgcagaagtggcatatgcaaatgttcctacgacttcatatgagcttcctgatggacagtaagttagactttagctatgagtacctatttgcttgttatttaatccatccatgtcaagaatatgtgttactttaccttgtagggcttattcaccgttcctaaatatcggtgcatctgtgctcccttatctgtctggcataaaaatggagcatgactgcatgaggaactctgacttaataattttgataaaaacctagtttatcatgctacaaaacaaatttaactcaacatctgatgaattggggtttgagactggggatcaatatgacaagttactgtttacagaagttggatttttttaataacaaattacatgtgttttttgaggtgggatttacagatgcattgagagggtggatgcatcccatcttttccactgctcttgtataatcttctgtttcttttttctttggcatgttctgtttatgggattcttaactatctgatatttgagcagaactattgaagttggcgctgatagattcaaggttcctgatattctatttaatccatctctatcccaggtgagtagcgaggaaaggggtctgtagtacttactggtttgaattaggttgtaatcacctaacttgttctagtgctgtgttttttactgcactggtttttgtaatggatccatgttattgtgcagaaaaaaccctagtgcattgctttcttgtttagtgtatgttaacagtggtttagataattgtttgaactcagcagacttgctttctttcaccttatatcccggccttcattctcacaaattttctgaccaacagactattcctggaattgatggatttgcagattcaacaccagtccgtggccttcaacgaatggtaagttgaatgaagcctgtactgttctgcattgcaggcagcatggcaatttggcatatatagctaaagttgctggtactttgtttctacccaggtcattgacagcataaataagtgtgacgttgacatacgaaaggagctatttagcaatatcttggtaaggacatgaattccagagcattttactactttacatgtatcatgcatggcagcatgtgcatgcgacattagtcccttcagcagcatcctttttctatgctattctaacatctgcaaacttttattctgtatagctttctggtggttcatcatcaattctgcagttaaaggagcgcctagagaaagaagtattagaggtacaaacttttttagctctttaaccacaagtacatacttgtaatatctaggtttgtattaaactgaaactatatgaggtgctttaaaattttcatttcagtataatttgatttccaactatggaactactacaaaagtaatggttaatagagtatacagactatcggtagcttggtacctacaattggatatggtgggagtgtcatattagttcacatatatttcccctattttgtgaccttattaattgataattatgaaacaattctctttgttcatgttggttagaaagggtgaacccacgatttttactcattttttatgctggttattatttccacattgaattattacaggagtctccgcaagctgctcgtgttaaagtcatggcaagtggaaactcagtagagagacgattcaggttagactattatattacctgttactccatgctttccaaattataagacattttggcttttgtagatacatagcttttgctatgcaatgtatctagaaaaagccaaaacgtcttataatttggtatggagggagtaggtaataacctactgctacttacaaatgacatggctgatttgttggaattcatatgcagtgtttggattggagggagcattcttgcatcccttgggtcgttccagcaaatgtggttctccaaagcagagtaagcttgatattctataggccctcagttttctatacttgccctggacacctgataagtcgcgccatgtatctcgtgccaggtatgaagagcatggggtttcctatattcaaaggaagtgtccttgaagcaggggaatatgtacaaccaataatatgctttaggagcctttgttgccaaagggttctttgtgtacaacagcttgatgccttgccatgttggccaatgaagactcgagactctttttaagtgacattaattgttgtcatgactagttagttttaggtgatgtaagggttactaagaactgggccagctaaatatttatcattaatggtagattcatacgctgaatcttattctccctgctgtacaatgagatgagacccttgttctgtaccggggctaactgttccctattgccagcacttaagagccaagatgattgttgtaacttgggttctttaaatcccagtcgcagttcgcttttc

SEQ ID NO: 129 - DNA, 3941 bp, Sorghum bicolor
  source 1..3941: mol_type = genomic DNA
aaaggcggcccgccactcgccccgctcgagccggcgccaccccgattgccgccgccgccgctgacgagcgaccgcacgctcggcgcccgccatggacgccttgtcccgccccgctgtcgtcatcgacaacggcaccgggtacgccctccctccctcccgctcctctccctagatctgcgcgcgcaggcgcgacggcggtgagtcacgctgctgatctgctccgactctcgcggcaggtacacgaagatggggttcgcggggaacgtggagccctgcttcatcacccccaccgtcgtcgccgtcaatgattccttctcctcctccggccagcccgcggcgaggggcgcccccgccagggggaactggctcgctcagcacagcgccggcgtcatggctgacctcgacttctacatcggcgaggaggcgctggcccgatcccgcgccagcacctcgcacagcttgagctatcccatccgcaacggccaggtgggcgctccagctgtgtactgccgtgtccagttgctgctgttttttttttcgcgaccttacttacggttgattgatttgggctgaaatgaactctttcaggtggagaattgggatactatggagaggttctggcaacagtgcatcttcaattacctccggtgcgacccagaagatcattattttcttctaactgagagccctctgactgcccctgagacccgggagtatactggggagatcatgttcgagacgttcaatgtgcccggcctctatattgctgtccaacctgtccttgcgctcgctgctgggtacactaccaccaaggttagtcatcagagcttagccttgttttttttttagcctaggcatgccttacgcaaaaatggatggcaattgcatatttgcattgagcaggccatgtttcagagtgtaccttgaaaatgcttcaccactgttttcctttcttccctgttgagcgatcatcacactcttatatttatgagaaacttcatgctttgttttcagtgtgaaatgacaggtgttgtagttgatgtgggtgatggggctacacacattgttccagttgctgatggatatgtcattgggagcagcatcagatctattccaattacaggcaaggatgttacccagtttgttcatcaacttctaaaggtatgctttcttgttgattgtcacaagatactactcaactttcaacttatctagagaaacttaccaggtgtaaaggaaatgaaagattctagaaaaaagtactttgttcaacagagaatagaacataatagaattacaaaattgtggttaatttggagaagttgctatcataatggtatgttccttgtgtaataatataaaacaataagtttcacttaaacattcgttcaagaaaaagcttcaccctaacagttaaggatagccacagcatgtgataaaaccatagctgtttttttaatcatagatctattggattatcacttgaacttggcccatgatgtgatttttgcgaatatcttctagttctttgatccacctactgttgttttctaataaagattgtagctatgcctttctgggtaaatgagcacctataataagattaaaactattttccgttggcatgcaacttgcttggtgaattgatttatagtttaactttgacatagataacagaggatgcacagcatctgtttcttagataatttgatataatcttcttttagaaaataacaccaaacatctgcattataatatttaaacgcatgaccgagtcccgtatttttgcatccaggaaagaggtgagaacattccaccagaagaatcttttgatgtagcaaggaggattaaagaaatgtactgctatacttcttcagacattgtgaaggtatttaattacattaagtgccttgttatgttacttggtgaacatacatactttgatttagaagatttttttttaaaaaaagaaattcaaaagaatgtgggtggaggagactgtccttcaatgctggggctcttcgttaccaaatataatacacctaagttcaaccccaatcccagctctttttcgcttttcatggccgtacattctgttttaagtatggtatagtgcccccccccccccccccccctagttgaaccattgaaatactttacacctataccatactgactgagatctgattgtgtaaagcactgttcgagaaataaacatgtttttgccaaataatgccatcaattttttgtttcatattttctcactggtgaacgttttcctttaaatatgatgtttcactcctgccagcatctagccatggagtttctgatagaaggtccttccaaaaagaacaattagtcacaatttaccttattgttgcgatttcaggaatttaataaacatgacagggagccatcaaagtacgttaaacactggacgggcatcaaaccaaaaactggtgcgaaatacacatgtgacattggatatgaacgattcctggggcctgaggtatttgattttactaaatgagtgtacacatatgtagtaacttctatgtcaccgtctgtttcagacttgcagtaattggttgtaggtagaccatgacatgcagaagtactccctcttgttaatctgagttcgctttacgtcatttgtacgtgagttaaagttggcttcgtagaataactagtttgacacttttgagttcaaactttatgtgactgcaatgctaacttttcgtcgaagtaccctgagatattttcgctatgcattttaacatcaccatcatgttgccttctcacattagtgttaaatttgtgcagatcttcttcaacccagagatatataacaatgacttcaccactcctttgcaagttgttattgacaagtgcatccaatcatccccaatcgacacaaggagggctctttataaggtttttatgatatgagtattattgttaccatttattctaagacattacatcgagtctaaagaatttccaatggcacagaatattgtcttgtctggaggctcaactatgtttaaagatttccataggaggttacagcgggacctaaaaaagatagtggacgcacgagtccgtgcatctaatagtcggcttattagtggagatactaaggtacaaaatttgctatttgctcttaatgtctttctggaaactggaaactttgttctgcctgccagtttttcagtcacacataaattatattgattttcaggcccagcctatagaagtgaacgtggtcagtcatcctattcagagatatgcggtatggtttggcggctctgtgcttgcttcaactgccgaattctacgaggtatatcagcttaaattgtctatgcacatatagcattacaaattttccaggaaagaaccagacaacttatctgcttgcgcaagtttattacactacatcttgttggatcagtatatgtgtaacaacttattttgggagttctttcctatgcccaggcttgtcacacaaaagcagagtacgaagagtacggtgcgagcatctgccgatcgaaccctgtgttcaaagggatgtactgaatcagcccatcatataatcccattctcaatggtatgtattaaaccgggagcgattccctgaggttgactgtcgtgaatggcatccactccagcgtaaatggggagaaggagaactgacagtggagacggactgtccagagggatcctggagaagcatagccgtacgagctgtacaaacgaaaagtgcaaatagataggttcatgtttcatcatacaatttagatgctggtaggcctgacaggatgggtttgccacctctgctgaattgggtggcattgtaatttttagcgtcaacattgttgcttctggcgatgcggcattgctccatgtatacatgttgattcggcaacaattttttttctctc

SEQ ID NO: 130 - DNA, 6768 bp, Sorghum bicolor
  source 1..6768: mol_type = genomic DNA
gacgacttcgcctgcctgccttcccgcttccctcgtcaaccaaaccaaaccaactcgtgaggtctcgtccccatcgccacgccacgccacgcgccgcgcaccgcccgcctcctcgaatctctcgagcccgcgcgccatccgatcccctgaaatcgatcggcccgaccctagccccgcccgccgccggccaacgcccgcccacctcggctcgatcaggcggcccccgggggggagcgagcgaggcctccatcgcggcggaccccgatgccccgcctcccggtcactccggcggcggcggaggcatgagccggcggggactcgccggagctgtcagccatggacgccaccgcgcgcccggccatcgtcatcgacaacggcacagggtaactcccgacccgaccgatccctccaccctctctctctctctctctcttcctcaccagctcgctgtcctgtctccgacccgacctgacgacctccctccaagtcgctggtgccagtatactgctctatcagcgcgcgattcccccgtgtggtcggctggttctcgccgagctttcagccatgatcccgcggctcgcccccctgaaatgggttgtgcccgtgccagaggggatgggtgtcaggataccaggtattgatggggcccgttgtggtttggtttgtcgtgggctcacattctcggtgtacactttggaggcaccggtttggtgaggacaacggactccatctggttgtgctgtctgttgtgcagtcaggataaatctgtgcagggtaaggggggaagagttggggaggaaactgttttagagtggtagcctttatttgatactgctcctcagtttctcttgaagtagaatgtgaaatattgcctctgtcctgcttgtgctgtactttatggtacatatggtatccactatcctcaactcaaggcagattccacgatgacttttcctcttgtactctcagcttgcagcaagtttaggttgtaaggcattgcatcgttgtcacattaagattccatatctttttatgagcaactaacaaagtcacgagaacagatcctaaagtaataacgctcacaaaatgaactttcccaggatataaacagttctaattgattctgggttgcttcaatttctatgcaattgttaaactatttgctaaattatgtcacttctgcttcttcttcttttctttgtctcagtaccacttgcacccttttttctactatgagtttatgacttgactatcaccattttttattcttacaagatttttatactcttatttttttaggtatagcaaacttggattttctgggaactcggagccgtctttcaccctccctactgtcgtagctgcgaacgaatcttttctagaccagacagagctgttgagtagtgcaaactggatagcacagtataatgcaggcatcatggctgatcttgacttttttattggtgatgaggctctatcgcggtttaggtctagtgggctgtacacactaagaagtccaatccgtcatggtcaggtatgtatatacatttccttttactgatcctgtcctttgtttgtgttctacctccgtatgccttatcctctttcctgttttgcaggttcatgactgggacacaatggagagattttggcagcaatgcattttcaattatctacgttgtaatcctgaagagcactatttccttcttacggatagtcctgtcagtacacctgaaagtcgtgaatgtacaggagaaataatgttcgagaccttcaatgtccctggactatatatttctgttcaatctgtcctcagcctttctgctggatatgcctatctgaaaagtatttctgatgacgattcagataccgtggtaggttctgagaatacctcctttcgtgcttgtttaccaagtatttgttactgcataaaccacatcttcttgattggcattcattgcttttattgaattcttttttttaaaaaaaatggaaatgtaaagttattattgtgattgcatgccctcacaaagatcagccacccctttacttatatatgtctctttgaatcatgatgtgtattaaaaaggtcagcatcataattaatatataatctgttgcttgtcaaattctagaactcatgattgagggcagtcatttgtatagcaaatcactgtttattgttccagtctcttgaccctttttcatttaatgcctataaattctttggtagagcacattgcttctcattaactttggccaatatactttgtcagtctgatatgacaggagtagtagttgatattggggacggagctccacaaatcgtgccagttgtaaatggctatgtaattgggagtagcataaagtcttttcctttttctggaagtgatgtaacccagtttgtttcgcagcttttacaggtacatcatgctctccattttttgttgtgattactttcagatgcaaaattactcgtattgctcataaatagggctgtatcgatctctggttctgtgctcttaaatcaaagtttattttagcgttataataaacttggtgttcagtttcttttttttaccaagcagacatatatacatattgtttaaatagggttgctttgcataggaaaaatgtaattattgaattttatggatgccaacatcaagtattgtaaaagcaagaatattgatctggattgatcaataagattgattattagataagactgcagactggtcaatgtcggtgggaatgctgcctgctgcatggaaacaagggcaaaaccaggctattttactgctgtgaatgggcagcaatggatattttgatatcccaggctaaaatgttgtcgatccaaaaaaacaagaccaatgcttactactgacatctatgattctctatcctggatctgctcatgtggcaagtccgcaagtgaaacgtagattgggtcgaccctagatattttttgccggattgcttgttattcttaatgctagtgtttatcttgttttatgtgcatagatgatgtgtggataaattagcatagctcgtactgagttatgttagatccattcagattgttaatgacaataccttaaaaatgttagccagcattgtctcaagaaatcaagttttgaccctccaaagtgttagcgtgcagatcatacattatcactagaaattcaatcagtaacacataaaaccgggatacttgttattttggccattcttctagaataaattgaatggtacgttattcattaattcctattccctctgttctaaatcataagtcattttggcttttccaaatatatagtctttgctatgcacatagaacactatgtcttgataatagcaaaagctatgtacttagaaaaaacaaaacaacatataatttggaatggaaggagtatatagtatttgaatgccatcctatccttgactattattgtgtgattgggaaaaatatttacttgaaaatggggaattctcatattaccatgattagtcacctggtgagaaattgcatcttactgcagagccactgtgaacataaaccatattcgcaattagagttgtactgatcggtattagtcctttatgctctcaatatttacttctacttttgaggcattctcttgtggtcccctgtaaaagctggatgaattttctcgggcgcatggatgctgtcctgctgatggtgtattacattataaatgctgttattgactagtgtcatctggtggttttgcaggaaagaggtgagcttttgccacctgaggattctttagatatatctcgtaaagtgaaagaaatgtattgctatacttgttcagacattgtcaaggtattgacattttattttccattggtcttcaactcttcagaactagcaaaattgtttaatgggagttgaagtcccctaatgaagttaagcgtgctagtaaaacttgttccctgtgtaaacactacttttgacctggttgtagaatctgtttaatgttattttatgtttgcttctgttgcttaacaatgactgtagataccttttggtcttcagcttctcaacatgtagactaattttatgcactgttttcttttataaatatatatgtggcaagtttgatataagtagtacttctagcaagaggccatacagtaggcatctatgttaaacaaacaaaaagatttagattcttatgcatctccattacaatttcaggagttcaagaaacatgacaagaagcctgataagtacatcaaacattggacagctgttaaaccaaagactggggtcccatatacaattgacatcggatatgaacgctttcttgggccagaggtttattcctatttctgtcatcaaaactgcaatagtctgtcatcaaaactgcaatagtttttttgttcccaaactattgatccaaaatggtataatattatggccaacgatcatcttttgagtgtcaattacactgtgttgcagtgatgaatttattatagcttttgatcttacattactctgagtaagacagaaatttagcttgttgttgctgtaaattaagagataaacttcatacaagacatcccggtttcttgtgagcatttgtttctgttaattgcgtagtaaaggaactggttaacaatgtgaatgtacagacttcactggatggccatttcacactgtacttattcttgtcctgtggcaatatcaatggagttcatgggaacaagggtcaaggattgccaatctgcggttcacatgattgcagcactatttgttcatgagtttctacgagttgtactcatttacattgtcatactgaactaaagcttcatattataatgtaacatttatgaccaacttgaagaatgaggtcacatcaatgaatggatttgtagatgtagagttgccaatgacagtcttgcatacttatagaagcatcttttggcatatagatttgctactatttaggaactgagatcatggtttccttggttcatccgcaaaatgaaatagattgtaaattttgaaactttggtatttcttttcttctggacaagatagttgccctagcgagtacttgccaattgctattattctctggaactgtcttaacctttgtttggcactatcttggttcattaccttcttgtagttactatataaacattggtctctacttccaatcgaatactaccgtgtgcttcatttttacactgtcaagtgatatcgataagcttttgtagtagttcagcccgtacatcatgggtatgaaattggcactaaaaaatgggtgttatcaaatatatcttgaaaaggttattaggtgctagaaattataagtttgttttgccttgagcttaattttgttggtatttaacctttttgttagaataaacttttaactttatacagttggttatgatttttctaaaaagtcagaattaggtgtgcatctctaaccatctactaacaaatgcagatcttcttcaatcctgagatttactctgccgatttctccactcctttacccgagttgattgataactgtgttcagtctgcaccaattgacacaaggagagctctgtacaaggtgctttcttcaaaccctgcatggatatgtaagatgggaagtgatatatgcgaatgctgtggcatttatcagaattctatttttttgcagaatatagtattatctggtggatctactatgtttaaagacttccacaagagactccaaaatgatataaagaagatagtggatgagcgtgttgccgcgactaatgcccgtcatcgtgtggaagtgagagtaagtacagctgattgattctcgatccccatttaatgtactcttgttgtcaatattgtacatgttagtaattttatgtacttggtactgtcatttaatttgactttttccccctgttgtcagcctattgaagtcaacgtggttgcccatccaatacagagttatgcagtttggttcggggggtcagtagctgcgtctaaccctgaattctttgaggtacctgccacttgacattctaggggcctcaataaattggcaatcttcagtaatcactgtatttctgctatcttatcttatcttaaacttataatgccagtaaaatgtggtgaattgcaatgctttatagcagtgttataactgagttatgaatacaattattcctcgtgaccctaaaaaaataattatttctcgtgacctgaaaaaaataaaacaattattcctcatgaattcattttatgtgaatgaaatctaagtgatttccctttttctcatgcagttttgccacacaaaggaggaatacgaggaacatggagccagcatctgcagaacaagcccagttttcaaaggaatgtactgaaattttcctcacaacccatcctctgttaggagctcatttaggtttcttttcgatagaatatagccaattttgattcttttttggtccgttccaaccattatcgggccaccctgactagatttgtagctctgtttgtaccagttgtttgttctgtgttctgcgtcgcatgttgtgtatagccaacagcttggttcctgttcgaggtgcttgattgtagccacaaccttggacagtttagaggaaaaatattggttattcttttacattagcttgttcagacagatttacggaactcttattaataagaagtcaggctaaatttaggactctgttcaacaatacagtgcgtggaataaagaaatctgtcgtgga

SEQ ID NO: 131 - DNA, 5119 bp, Sorghum bicolor
  source 1..5119: mol_type = genomic DNA
aggcagagtcaggacatcgaccgcgacccccgaccccgccggccgcccgccgccgggatcctccgcgccggctgcccccccaccaccgctgccaccgctggccagaggccgctgcaagtccaccccacccctgcgtggacgtgcgctccgcggctccgccggcaggtccgcccggcgtccggctccgggcgcgccgaagccgcgaagccgcttgccgggccagccggaggccgtccaagcgcccagtccctgtgcgccgcctggtacctgccccctggtggtctgttgacttgactagtgagtgcttctgacttctcagcttatggtttggagattggagattgtactgtaaatcgggcttagggattgtagatttgtgagcctagaattgaatgaaactagttgaactccccgcgtgttgccacgggaattagtagtgatttctcagctgaataatggccggcgaagctgaatatcaatgatgtagcttgttggagagcatgcttaacaagttaacatgttggagtagaccattgaaaacactctagtcaattggtattgttgtgacataactgtatttttataccattgaatttagatatagatgtagatagggtaagaaaatggttaatttatgctataagtgactatttgtgtaagtttcagacctatttatgtaagttttgaaccttttaaatgttttatcgcaattcggttaatttatagtcatgtatactgaacttttttttgggtttattgtattgcatatgaattatatttttactaggactacccttgttttaaatcctgggtccgatagtattacaacatgtcgatattgtaatcagtaatgcatatagtaaagatatggttatacaacaccatatattggaatgataagccacttcctcaaacatatactttacttttttctttgaactaataaacatactttactacctatacaagctcacacgtatatagtatatttaaaaccgctattttccaattgcacaagacatatgctgggtggggtggccgctcctggcccgtgctgaggctgactgctgtgagcctgtgactgggaggccggtagccgggtgccatctgctgtctgccgattcgagtagaggactaactggcaaccattaattcaaattgtaagttaatttggtcaactggcttaccatttcagtgcattattgattgcagtttaccaatatttattagaaattggaactgagacagtggctaaggtagtgcaatttgcttagagtactttgcggtattattatacaactactactatgtggtattataacacgctgataatgtgttatatccttgtacaactactactatgcggtattataacatgccaaatagggctttcaggtacaaaaagttttgaatacccaacctcagaatcctgggcctgccactgtatatgttctcctattgttgtcacatgtttcacttgttattatagctgtctaatctagcttctagatccaatgtttcatgtgctacattacttttcaatctaattcagaccaactatcaccctagctgtatttgtgtctttagtatgttttttgctaagttgtgtattgcagactttctgcgattttgtgcaacctgctatttccatcgtgtttatttgcatctttttcatgtgtgtataggtctctcttaaatttcagtgtcacttagggactcctttccctgagaagaggcggaggctgggatatacaatgactgttggatcacgtgtggtggtgatagacaatgggggtggtcttctcaaggctggatttggtggagacaatgatccaattgctgttgtccccaactgtatggccaaaccccctggtggcaatgccaattccaaaaaatggctggttgctgatcagctgcaggcagaagatgtcgacgtgactggcatgacactgaagcgtcctattgatcgtggctatctcatcaataccgaggtgcagaaggaggtgtgggaacgggttttacgcaatcttctccaggttgatcctaccaactcatccctattactggtggagccattgtttaaccctccagcgctacaacatgcaactgatgagctggtgttcgaggagtttggcttcaactctctttgtgttgcagatagtccttcccttgtccacctttatgaggctagccgtcaaccaatgctcttccgtgctcagtgcagccttgttgttgactgtggcttctctttcactcatgcatcccctgtgcttcagaactttactctgaattatggcgttcgacgtatggaccttggtggcaaggcccttacaaattatctcaaggagcttgtctcatatcgttcccttaatgtcatggatgaaactctcctcattgatgatgcaaaggaaaagctatgctttgtgtcgcttgatgtccctggtgatcttcaccttgccaggtctgctgccttcataatctgtcaccctatacatcatagtttcaattcttctttccgtttgtttaagaataatgtataatggtattttcaattaaattgggtcaaacagcaaccttaattttgaaatgtcattttgtagcatttgacctttgaatgacttgcctgtgtaaccaattgactgcatctattgatagcctgttatttttcaaacttgattttataacttcctgaacagagtgcatgtgtatatgtgtgtatagaaggtagtgggcaaggttttgtaagtgaaacttcactaggcattgcagggcatgaaagatcttagcatttgaatttcaagaatgcaaaacttatctccggcaaacaaacaaacaaacaaacaaatgaaccaagcataatggatcatgtttctggaatcatcctatacttgggttatgttttctccatgttatttaaaatgtcttcttcaaacacactggatttacagtgccaagagacgattttctctctggatgctatggaatgcccacccatgataggtgaatgttactagggacaaattttctttccttaaaaggttgtttagaagtatcatcctaaagcatattgtgctgcattagatcaaaaaacatgttaaatgatgtaaaatcacattccttcaaagttggaatgctactaattagttgagtgttcttcttaatgaaatgacatgcagctctcttgccttgttcgagaaaaactaattagttgaataaaccaagggattttatgctactcaaatcacttagcagtttgctgtgcaattgcttggcaggttatcatttaaggacaacccttttaggtgttcttacattctccccgatggtataacatacaagaaagggtttgtcaaggacatgaatgaagcacatagatatcgctctctgcctcttgatgaagaagcaaagagaaaagaacatagcatggatataaataagtccgaggaccggaaaaagccagaattaagtcaaaatgtaagatcgttgcctctttgctcagttgccttttgttcttgtggtattattaatgaagttataactctgtaggaatttgtattgacaaatgaaaggttccttgtcccagagatgctttttcatccaatcgatcttggtcagtgtcaatgtgaaatgtcatgtatacttttgctcataagattttaaatatattctctcatttatgatctcaattctcaaattgttttgggaagcataccagtctcatgtttcttttttttttctttttttgtaaaaacattgcaaaacacaataatgatttgttccatttgcaatgaattcagatcaaccattaggtctttttttctgatggggaggatttgcacggtaaacattgagatgcaaaactagtaacatataattcttgccatgagactcaggagttgctattcacttgacctgctgcttctcatgctcattagtctggatctacttactgcatttcacatctatcattcttcttttccttaaactttagctaacaatagaacacaagacattgacgttttgttcatttttcttctgcattggagtattgttagggctggcacattgttttagctgctcatttttgccatactaatctccactgtgcatatttataggcataaatcaagctggacttgctgagtgtatagttcgtgctgtacaagcttgccatccatatcttcaacctgtgcttttcgagaggtatcgtttacatctgcaccagtcttgatctttgaatatgctatgcatgtgagtttacattgttgtgctgtttccagcatcatcttgacaggtggaagcacactgttccccagattcgctgatagactgtaagttgtttcgttaacattattattatacagtatatgctgtcctgttcgttgcaaaggggccatcagatacactagttatttggtgtatttcgaggtggtcactgagattgcacaaactgtattgacagggagagggaacttcggcctcttgtccctgacaactacaaggttaaaataactcatcaagaagagtatgtctatctctccctctcactatacatatcacactgtatctgtctcatacatacatgcccaaatttatcagaggcaaatactgaaaattgaaacatcccatgtaattgaatgatattaattaacactcggctacttcttgtagcccaattcttggtgtctggagaggcggatctattctggcatcaactcctgatttcgaatcaatgtgcactacaaagtctgagtacgaggagatgggatcagcaaggtgccgacgaaggtttttccactgaagagtagagcttgacaatttagttgcatgtgaaattagaagttcggtttacagtagtaactcctctgcgcctgggatttcttttctttttagtaaaaaatgctttcttgtagttcactttttcagtagatagctcatgtacccgctgatctgatctgacaactgtagcaagtcatgagattgaaatggcaaactgccaagctggttcatccttgctatgatccttacggccttagcgcataagtttttttcccccatttctattggaaagatgcaatgtaacgtacactgtcgtgaatcgcttcaagttttttttttt

SEQ ID NO: 132 - DNA, 4602 bp, Sorghum bicolor
  source 1..4602: mol_type = genomic DNA
agctcaccggccaccagactgccaggcgccctcggccacgtcgactggcgcgcgagccacacgccaacgcacgtgacgggacgcgacgatgatcctgactcggttcgcctccccttccctctgccgtcctcgctcccggccgttcgtgctcgtgcccaaagcatctgctggtggcttctcctcctccccctcgtctcggccggtcgtgtccgtgtctccgtccgcgcatatgtagcgcgcccgccaccgacccccactgtccgcggggcgatcaccgaccgaccccatccaccttcttccctcgctcgcatggcgatgctgctccgcaaggtgtggggctccgtgctcgcgcgcgccgcggcgccgggggccgacccgccgccggggtcaccgagggcccgccgcgcgcaggcgcagcgcgtggagcagtaccagtaccacggctcgctgtcgctgggcgcgctcgacgccgtccccaccgacgtgctcgcccagatcctgcgcctgctgggcccgctcgacgccgcgcgctccagcgccgtctgccgcgcctggcgcgtcctcgcctccgacaacggcctctgggccttcttcctccgcctcggccccgagccctgggacctcgtcgtcttcgccgagacgcacctcgccgccggccccgcctcgcacccgtggtgcgtgccgttctcgcagctcgctctaccttctcgtcgcagtgcttaattctgccccggccgcgctcggtgttgtgcctgatatcgctggccattttgtaggctctactacgatagctcgccgcagctctcgtttaagcagatttacggcctccgagcggtggtcccgggtactctcatagtggatggtaagagataagcataaccctgatatttccaattttactttcgattagatgcccagcgcttgctcagtcaaaataaatattcgggaaactattgaatgaagtaaacctttgatgtttggattgttgcctaattgactaacttaatatttctgcataacaaaatggatggtagttttgtttgtacagcttcagttactaggaaaacttactgtactagaatgctctacattttatatctgtaaattgtgatcaaattcagctctttacatgcgcaatggaatgtactgtttcttcttttaattcttctttgtctgctgctgtaacctcagttcttggtgtgtcctctctgtttcttttattgaaggtggatctgggtattgcaagtatggctggagcaagtacgctgctccttctgggcgttgcgctacattcttggtaagctgtggtgatcggtggcaaggttcacatcttaaaggcacatgatgcccatgaatattgtgatgaccaatgataacttactatctcaagattggtgttgactgaatcatcagagcacaaagagacgttgctaatttctatgcctgttgtgattatcgtgcaggaattcggtaacattgaagcacctatgtatgcaaggcttcgtcacttcttctctactatctatacgaggtttgaaactacatcttgcttccacggtttcacgtttttccttgattattacagcaaatttgtccagtatgtcattttcgtgtgtgaaaagggaattttatcaacgatactggtgggcattgccgcattgggtgaatccatatcaagcaccttttgctgtgtctatgaaaacttaggctgattaagctgtgtattgtctaaacgattcaccatctctagtttttcacgtcagcatgaatgtccgttgctattctacaatgtgtgcgcatttatattttagcttgcatacttgctgttgatttcacatgctaggagatagttctttcatatgctttatattttcaattatctacgatagcaaaattctatgggtgacactttgttgttccatcatcctttgccctattgggatatacagatatgtgttcaacaaaaaattctcgtatattcgaggattgctttttattgtagtctcttacccaaaagaagctgacaaatgaaagatgaaaagtttactttagtttatttttttcgcctctgtattggtttgaagtcatctggagcttgagccttgaggtttattaaggatttatttttacctgatggaccatctgttgtgatgtttagtgtaaattgtttgctctttttcattgtattatacatcctattcttgacttttacaggatgcaaataaagcattcgactcaaccggttattgttgtccttccactatgtcactctgatggtttgagttattgcattcttacttgacccaacttcctagtttaccgccctgtattttgaccatattacttgactaaactttctatttgtcacagataccgagtctgctagggcctcaagaaagcaatacaaggagacgttgtactctgtcttgtttgacatgaatgttcctgctgtttgtgctgtcgatcaagtatgcatacattatttgattactagttaaaccaacatgattcctttttaccacctcatgttttctatttaatcagtcattgccccttcctgaaacacttttgtcctgatgatttcgcttttgtgagttaattcgtgtaatactacacgacatcagaaccatgagttttagtcaaagcttgagctatccaactgagagtttcatgtttaaatagtgtatcaaatcttaacgtagacacgccatctttcttcgtggtccaagtgtcaaatattgtttgatgttcaactcttcgcactttgtatgtccttcatgaacgcaagatatttacaaactatctttgagtacactttcatgaacaatgagctcactggcatttggtttccaggcagttctatctttgtatgcttctaaacggatctctggtattgttgtgcacattggattcaatacaacttctgttgttcccagtaagtaattgtccatattgatattattaaggtttttcaagtatttactgtgtgttcctgtgagtttgtggaacattagccgtgctgtttggtgtctacatctttcagctgcacatatcaatgccatttacatttcaccattctgataatatattaatatgttttcaacagtctttcaaggtagggtaatgtatgagataggtgttgaaactgtggggcaaggtgcccttaaactcactggatttctcaaggagttaatgcagcggagaaatatatcctgtgagtcgctgtacacagttcgaaccatcaaggaggtaaaatttgtttatgctgcaatgctaaagttgtttggagtacagacatttcttttaagaatctcactaatagctacattgtatttggattttagaatgaagcttatctctggcttctgactctgcctctctttctctctcatgtgaagaaactttgctacgtggctgctgattatgaagctgaattacggaaagatacacaagcatcctacgcggttgatggtgaagggtggttcactctgtcagaagagagattcaagactccagaaattctatttcagccccatatgggaggaatgtatggaatattcagatactgtttgatttgtgctttcatatttttttaaaattcataacagtttagctatggttgctcaatattgatcttccacttgcaggcgtgctatgggcttgcataaagcagtagctctatgtatggatcactgctatacttcaggaacagttggtgatgacagctggtacaagacgatcgttttagctggtggatcgtcatgcttgcctggtttaccaggtatttttcctgtgcatattagggcagatatactcttcagatattacttagtatcaaaaagaaagtggaataataatggctgatgctaattattctagatcttatttgtttcggtgactctgacgaatgtcatgtgaatatgtgatacaacagagaggctggagaaagagcttcaccaacttcttccaccctatatgtcagaaggaataagagtactccccccttcatttggcactgattctgcctggtttggtgcaaagatgattagcaatgtaaagacatggaaccttgatcttttctgtgttaaattcaatttcaacattcatgttaatttcactcactaatggctgctttaactttaggtgagtactttcactgaggcatggtgtgtaaagaagaaacaattccgccagaagacacggcgaaatggtccattgtttatgaattcctggtaataaaaatctggcacaagtcaagagtaaaagaaacataaaacatggagttcgtccacgcgtcgttgtatggtacacgacatccggtccatgctccatggagcctccaccagtatataaaagaatgagcattcatgcccacatcatgtatatatggattatgagcaaatgcatcattcggtattgttgttataagatgttttggtaagttcattgtggttataggatgtcagtaaaagcacaggaattgtcttcagcagaacgatttgagtctctgacctctctgtttatagttctcatgaagtttggtacagttctagatgttgtaaaacattttgcaaatgagatggtattttttatttttatttc

SEQ ID NO: 133 - DNA, 6447 bp, Sorghum bicolor
  source 1..6447: mol_type = genomic DNA
ctagtctcgagctcgcgactcgcgaagttgaagagaacgacgcagcaaaaaggacaaggttaccaaaagctccaaaccccctcttctcccccgcttccggcgagccctgtcgccgccgccgccgccggcgagatgtcatcggtgacccgccctcggcgggaggccgactttgcgcgcttcccgtcgtccacccccatcgtcatcgacaacggcgcttctaccttccgcatcgggtacgagctcctgccgcgccgggcactccccaaaccctaaccctagcgctagcgggccttccagtattctgtaacgtggcggttgcctccgtgcaggtgggcgggcgaggcggagccgcgcctttcattccgcaatgtcgtgcagaggccgcgccaccgcagcactggtacgccgccttacgctatggagaatgctaattggtgttgatttggtggttgaaagctgcgtcaaagtgtagattttctgttctcgtgtttgcttagttgctccttgctgttcggtttcagaagttgagtgtgcagtttccggctggcaggaattttactttactcttataagaatcgttattattgtgggcgattcatttgcgtttactcttttctttgttgtttatgtgacctgtgcgacagtatattgatcatttgggacggttatagagttcgattccaataccactcaagctgttttccatttgtttgtgtgatttcactcttgtctacatgaactaattctgttggaattggatacaaattgaaattttagttgtctgcatgtctgcatagacttgataggattgtgttttatgatcccatgttactttggtccgtttcatgtacttgtgctacaagtaatcctgcaaaatgttctaaagcccatatagtactgttatcattgtgtttgctgagtgctctgtaagcttcatattgttttgaatcatcattacatgaaaggaacagaaatttacttatttgaagctgtcaactctcatgtctgtttcaatcaacggacttgcaagaggattaacgaaagtttcattattcaactcattgtaatttgatttccatggtacaggtgaaactgtttcaattgttggggacactgatccatctctaatgaagttctttgactgcacaagatcggcagttcgctctccatttgacgatgatgttgtctatcagttcgagtacatggaatatgtttgttctcagacaccatccaccactttttagttctcagtagatatatagatggttctttgttattcatatttaattttaaagatagataaaccagtaatcaatctgttctctagaatacattaaaacaactacattcttgataaatcacattagaagttttaattagggcaaaatcgctaaagtactacatgtgttaaatgatattttttatgtccataatctgtcgttcaaacatgatggtaaaaaatattgtcaaagcaaaatagtgaaatactctcataaactgttttatattgagggcctgtttggttccccttgctaaattttagccagctaaactttagtcactttagtagctaaccttccaaacacactgactaaaaaggagctaaaatagtttagtcccactagtcacccaagagtagctaaaataattttagctagctaaaatttagcaaggggaaccaaacaggctctgagtaattgctccattattagccgagtgatcatctgtctcatgattcagatggtcccctataattgcagtaagtgccaattgcaatcttatggcccaaagagataaagaaaacatgtgacttcttaattttctggatcatggtgtttacactctagggcatattccttttgcccttgatattgttcttttttcttgtctgatacaatattatttatctattgcagattcttgactatggctttgatcgattaggtgccaattcagaggtaaatttgctttgtgtcctggtttctttccaaaataatttatatttcttcttctgttgttattggactattattatcttttcttttatttgttaatttgctgtccattgtatttgagacataagaaaaatgctggtttagctagtcttgttgaatcacaggagcgtggtttatgtatgatggaataaactatcagttcagtgtgtgtaattaatctgataatactgggttctctccagatgcagatcttagagattcttatattgtatagcattcagtagaattttccaagtcagtagagtgtcctaatatttccaagaggaactcaagctgcagcctttcataaaggcgaggcaaatgaccataaatgagtggtattgagctactctactttaaatacaaaatgtgcatgggttttcaagttaactctgttggtaagtttgttctccttgccagtccatgataccaaaacataaacaaggaagagttggcttcctaaatcagcacttccatgttcccatagtgtaatcactgcacattgcttcaattatgttagtccacatcagacatgcagacacttattaagacggctatattgtctgtccgtatatatcctctaccagaaatttgtgccttctctttcttcaactaaactgttattcggctgagtgttgttgaaagctaacaatgatgctcaacaggttgggcatccaattcttatgacagaatgtgaatgtaatccgtccttttctcgagcccgaatgtcagaactacttttcgagacatatggtgtaccatccattggtaatattttctgtgatcttgatgttatgagctgcatctagttatatgttattagttactttatcataaggtttgcaatgctgatgctgctgcttttatctgaaatgtagcatttggcatcgacaatgcgtttagttataagtacaatcagaaacttggaaactgtaatgaagacgggctggctatttcatgtgaacatggaacttgtcatgttgttccagtaagttcttgtccccaagatacacctctctccaactttcaccagatataacaagaatgtttgcctgattttgtcttccctccagtaaaataaatgcagtgcatatgtgttttaaatatttcaattcatgtttaataatatttaacgactagaattgtatctattgataattctgtggtaaaaagaaatgaaactaccactgctgaagactactttcgcatgcagctgcagagtttttttattgatatcccaaggtgctgttattattcacatttttaagggaaattgtccactgatactcctagctgaacaactttagtcaagcttgccttaatctagtgtgatattgcaggtagtttttggaaaaatattatttcagtttctgctggggttcgacatacggaatttatcatgttaaatccatccttgagtgtatgaaccacaatatggattttgctccttttttttatgtgtaaactgggttttgctccttggtcatggtccctgtagtatagtcaataatgaaaagaaaactctactagaatcattaaagtatttctgtgaaataaaatttctgcttttttctcacatgtgtatttcaaattaaattattgttttctgaactaaagtccttgtttgatctgttttttcagtttttgaaagggcagcctgtgttgggggcatgctgcagaaccaatgttggtggatttcacattactgattttttgaggcagcttctctctctaaaatatccctatcacatgtaggtgatagaagtatatttctgaagtacttcatagtgtttatttttcctaccatgtaacagtaccattttacattgaacagggcaagtattacatgggaaaaggctgaagagctgaagaaggagcattgttatatagctcttgattatatggcagagttgcagatatttaaagtaagaaacttatatatatattttttgttcttatataaagctttgaattttgtattcttgttttgaatgaacttgtatagagtgcatagggctttctataggatttgacaaatcgttgtgcttgtacttccttgagatggtgattcttttcttccaaaaggatatttagttatatgttttctctgttactgaacattcttgtaacaccatggattgatcacttcatgttgcagaacaataaggaagaagctgatgagaaaatgaggtattggcagctaccatgggttcccccaccaaaggaagaaccaccatctgaggaagaacttgcaaggaaagcagctttgaaggaaaaggctagtcaacgtttgcgagacatggctgctcaaaagagatctcagaagatagcggaactagaaaagcaactttcctatttggaggaagtaatggagcaacttgacgaagctgaggaacaagaagcaacagttattctaggtagatctggatatctttcccagcaggaaatcaaatctgccattttgaaagcaacacaatccctaaggaaagcaaaaggggagtccaatggcaacgatgagaagacagatgcctcagcagctgataagtatccgcttgtatctgtccctgatgagacgctgacgccagagcaggtctgtttttgttcagttattatctacagaattctattcatgtgcttctaacatctagatattgtgtgtatacacatattctcttaaatctacacctttacataccccggaatctctgaccattgttgcattccaattttgtgtattttaccagttaaaggaaaagaagaaacagatattacttaaaaccacaacagagggcaaattgcgtgctaagcagaaacgtgctgaagaggaggctttacgggagaaacaagaagaaaagaggcgtgcgtaagttgtgatgtaaccagtttgaaatttatcttttatgctttcttatatccaatgataagatactcctattattccatgtcgtgttaattttcagtattagttatttcaaagccactttcagcaagttccttctttagatactatgaccccttgcggatcaatgtccaaatataggacaaaactacattgtgtattttgccataccaaatagtgatcaccctttataaattgtatttccaagcatgtttttgatcttgcataagataaggtcctgtgtttttttaagagcaaaggaccgagccctgttgctgcattgaacaggaaaagaaaatgtggttgtgcctatgtattacgtctctagaattctgtatgagtcatctacctcatgtttagataaatgacctcaaatcttttttaaaatatttgccagacgttctattatatagtactcttgtaatttgtttcattcaactatatagggagaacccagagttataccttgaagagcttcgggcccgatattcagaactttctgagaagtttgagcagaggaagcgacagaaagttaatggtggtcagacaaatgggaaccatagttcatctggtggtgtaggacgtggagaacggttaaatgcagctcagaaagaaaggatgaggctgcttgcctcagctgcatttgatcggggcaaaggtgaggatacttttggtatgagagacgaggattggttagtctacaacaagatgagcaaagacaatgacgatgatagcaatgatgacgatgaatcggaacttgttcgaatcacatcaaagctccaggtaaaatccccgcttcaagatttccttctggcggtggcaattctatcctatcttagtttcatttcagatatcaacagttcggctataatcatatcatttgatgtttcattgtgcaggagatcgatcctacatttgtgtccaaatccgaagctgttcaactgactccggagcctcccaaagtccggccactcaccgcagaggattacagaattgccattgggattgagcggttccgctgccctgaagtcctcttccagccaggcatgataggaatcgaccaggccggcattgatgagatggtcagcatctcactcaggagattaatggaggatgagtctgtgaaggagcgcctctgccagtcaatccttgtcactggcggaagctccctgttccctggcatgatccctcggctggagtctgggatacggcaatatcggccctacctcgctcccctgaagcttgtcagagcagctgatcccattttagacgcgtggaggggtgctgctgcctttgcggcatcaagcaagtttggtaaacaaactttcagcctagcagattacagagagcatggagagaacttgtttcatcggcacaacattgtttactcactataacttctcacacagaaaatgacacagtgagcgaaccatcgcagtgaggctatttatttgacagctgatacaaattgatgtagcaacaaagattttctaaactgcagttgattatatgattggaattggagggttcaaatgatgagggaatttcagaaaa

SEQ ID NO: 134 - DNA, 17186 bp, Sorghum bicolor
  source 1..17186: mol_type = genomic DNA
cgaaaacgtgggcaggcaaacccgcacggccgcactggaagaagagcttgctcaaaaaaaaaaaaaaactagtggaagaagaggaacagtgtcttcgtctcgaaccccggcgtccgctccgccgcgctagccgccgccgtcgccgccgccgccgagatggtaagcgctaacgtcctcctcccttccttatcctcctccgtcccaccgcatctggtttgttcctccttccccataaaccccggagaaaccttagcgagcggcgattgacaatttgattaatgtaccgttccgcaggattacctcaagacggtggttccgtcacagctcatggccgagcgcggctccaatcttgtcgtcatcaacccaggttcggtcctgcagaaaccctagcgctcccatgtccttggtcaagttttttttttctgggttccaatgtgctcggaatttctgaaccttatgttacttttgatggttgaaatgggaattttgcattgttttatctgtgcctggttaaaaggaatgccttagtattgtagtactgaagtgagcttttaagagaagcatattacctgacatgtatgtaacttaccctgctggcagtgggatgctgttgttgcttacaactgaaaggaaaatctagcaacacatttgtatgtttcccctgtatatgatgtaattcatggttgctagtcatttaattgacatgttttataggatctggaaatgtgcgaatggggtttgctagtcaggatgtgccattcaatataccacattgcattgcccgacacatcaatccacaagagggcgaagaaccaagattctctgtgcgcgatcaggtgatgcaaatacgagtttgcttgtatgcaggtcctctcccatagtgttatgcattgcaattttaatgtatcttcttttagtaagcaagagttatgcttgtatgcagatgctcaactgccatgctacttcatcacagaatgcagagcgggagagtgcatatgatattgtaaaagaaaattattctgaacttttttccttttggactaggtttggctctgtagctaatgagttgttatacatacagattgcagcactgatgaaaatcccatttttggatgatgaagaaatgccttcaccgagccaaccccttcctccaaaggtactgggcattgtgatttgtgaccatgtgcccaaagcctgtaccattttttatgttattcgcacagtcacacttacctttcatgttatgaagtaagtgggaaatggcacctggaggtagggtttgcctccttgaagttcttagtcttcttagggggttgcaaaattgtatttgcacagtaaatgggctgggaggatgaagccttggacttgtttggtctattttaagaaatttgccgtgttaacctgggttcttagcctcatcagctcatgtcataatgataaggccaatttcttatggtgcaacagatgccagcaggagttgcttatcatacatatgtgcttataggttctaggttgtttataagttgaacaatacctagataagtttaagggtttatacagtatgctagtttatttgtaaagagaacccctgcatggtcctccactaaataatcattttaatttcttttatgccattgattttaaaagtttggcaacccattccatcattattacctcctgtttgcaacctgctgtttatcatgcctgtcctttgtgggccccaaatgccactcagaaattgttaagtatctgggcagctccaacagtgttaaaagggctagctcatagaatattttattgaataaggagagagagaatgataaggtagctctccatgaagagctaagctcacatacttttctatgattcatcattcatgtgtctatgcttgcacaattttctatatagcatgttagggttactccttttttacctttttttttcaagttcatatgagctagcaagttgactctgttgttgagggtgcccttactagcctaaccattcatctagaaatgatccaatacaagcaattatcgcattccttttcaaatttttttctgggccgaaataaaatgttctttgatttaccatttcttgtaaaaaacagtcgatggggccgaaccctagatatttctgccagcatttcactgctgttttgcagtcctctgatgttaaccatatgtatggtaccaccagtcctggattgtgtttattggtaggatcaatttacattttagtctttcaactttggctatcacttccattactatcattgaccaccttgttgcagttgccaagaactttacctatgttcttacagtggcttccacaacttatgtggtttcctcctgttttcatctgtattgtcttagttgccacatgatgcttagatctccagatatgttgttcatttttagccaatttgataagtccctcagagagatatagcacattatgacagtttgagatggtttggatgtaaatgcaaatccatgtgttctcacttgttatctatcagggaaacacacatttacagaacataaactatcattttggggctgtgccactgttaccatttcttctgtattcccatcagtctttagtttcaaccttaaacacttgatgtgctgctaaccatcattgtagcatggagtgcccaacttcagaaaaccaatggcaatataattgttttatggcaattgttcaatcaggtgttgttcagtgctataacaaatcttctcattgatgaaatatagtgtctccaagcgagcacataaattatctgagctttttcatgaatttcctttgtagctatcaatcaaagatataaatgagattgtcagatatgaaaagatgtcaagtgttgaacagagaactataatgcagtgtattagcatcatagcatgcagttgcagttgaaggttctaacatgtccatggatgactcaatgttttttcagctcttttaaaagcataaaaatagttctgaattatctctgtctgtggaacttattgttccaatcatggaacgtagcttcaaatatttgagactaattgatgtttggtatattagatagttcagcatcacaaaattcagttttgttttgtttgtttaagaaatgttgcaacataatctctgcatgctgatatggttatgttgacctcttcagatgggacgtgttgatggcttttcttcgcagcaaaacagagatgaccttaaattcacttggacagatgtgacagagagaattactaagccatccacatcaattggtactttctgatcatttcacttcattcattgaagtggtgcttaccttttttcctttttcatttcagagttgcagttgttaactaaagttaaactgtatatttttatgtttagggtactgcacttatggattagtttaccttttggaagttctacagcagtgtcgtttgatatggtttctacttttggacattgtgatttcttgttatgacttctgttttaaaacctacccagttaggatgacctggctgacccatatgaaacagctggagttaatttcagggataattttgaaaagctgctgctttttgtcattacagttacccagttatgttcaattctttgttaagaggaaattctacatagtaatttcttataattgttttgcctaacccttcgaattggccagataggtcagtatacaaggatgctgaggaagatactccgccaagcacatctggtgatgataatggacatgaatttaaagagaataagtataaagaaatgatatttggagaagatgctctgaaaattcctccttcagagtcatactgtctgagtcgtcctatcaggagaggccattttaatgtgtctaataattattcactgcatcaggtaggaaaccagattaatgcatgcttattttttaaaagatagttcaactgtggtatgcttctcttggtatatgttcttgataacacagcctgtgtaatcatggagtatttcagttcatttgccaagttttcttttggtagttctataatggctgagtatgagtgttttggctttgaaagtagttatttttgagacaatggatagaactctgggctgcaaaacagtaaagattttcgttttagaaaggcctaagctggatgcttgcaacagatgtatgtttctttctcctaaaagggttggaggaaagtagatatccttttgaatcgttcatcatactttcgtaactatgccctgtcattcttgtgtacgtgtcatatttctatatcttctttgataaacattatttgcaggttttagaagatttacgcactatttggaactgggtactgacagaaaagttgcatatcaacccaagagatagaggtctatattctgcaattcttgttcttggggagacatttgacaaccgaggtatttctcccttcatcatacaatagaattttagggtgcaaggtgggctcacctgtttatgaagtacatctatatgtcttggtacaaacttggtatgcaaaatatacaaaaggtttatccattttcttctcgtaatagatcactttcttgggtttgtgtgacctgatatcacttgccattccatagaatactgtcctgtgtgatgctattgcctagtgaattgctttactagacatctattacatgttaattgaagagagttaacaacagatgaagaagaatacagacaccatcaatgttcatgtgcctatgatggactcgttgatctttttatcgtctgatttggtttgtgttacatggtgtgttttgtttgtatttgaatgtttcttaagctaatgtggtattggtttttctttcagttctcccagtcgacatgattgtcaagtgttaaccacataacatagtttcttagcaatacagttcggattaacatgtagttctcaaataaattcttcctgaagcacatattcacatactattggttgtcatctgattcgatttattggctttgtgatatctgtggagatgatcatttgtcaggtggtacatttttatttgtgtcgtgatggtgtatcctacgttatcctttgtccagtttgtgaatccccatcctattgttgttggccatcactcatcaatttgtctgatctccttttctaatgttttacatttaaatgcccatcatccatgtagttaaggaacatttaaattgttaaattcataattagtcacagcccacagccgttcaatgtctctatcatatgtttgctttcttttctgtttttattactttgtccactgtcttataccgcaaagtgtatgttatgtttcataaggctgattctgttttctcatgaagaaaattaatttgctcaatgtatgccagaaataaaagagatgctgtctatcgttctcaatgatttggggttcagcacagcagttgtacatcaggtttgccttcgtctccaatctcttagcatttttctcctggttaatttgacttctcattcgagatggggataacttttgttactgtatggtgctataataatttcatcatttctgagcttgttggtttctttgtggaactactgaaattgtgttcactaattcacttgatagattatgctcttaatagaaattcagcatagtgcagagtgtcatttcactatattttgttatttttaagtaatatatgctggagagggttgcatcgcttttccaagctgagacttaggtttaagtaaatatggtccatatggtgttgggttgtcacaccctggcttttaaaataagaccagagtcgtcatatgtgtgcccaggaagtccacacatataacaaaagaatagaaatatcagaatcaatgttatatatagcagaaaaacatatttataataacacttacaaaacatcagagtacgcggaaacaatagctaaacttcttaggctccaatcttctcagggacggttgactgggggctccgtacgccaagcacttctgataagcctctagaaaactccatagcatctatatccttcttctgagcagcactttactacacactggggtgtgggggaaatagcaagggtgagttcatgtccaactcaacaagtacaggcggaaagtataatgacatgcaaggcttaatcaaaggaaaagctgacactgtttaactgcaggtgagcttttaagttggtaaacttttattacaactctattattaaaacaacctattactaaatatgggtaaagcatcccaacccttaattagatgaaagtatattaacaattttattaatcatcattataattattaccgaggtagcaacctcagatagtaactcggggtagcaaccccattaaggtcatgggatagcaatcccaatttagaacacaggatagcaatcctgccaacacggaatagccattccgccaaagcacgaggtagcaacctcaaccaaatttcgcctccaagtatccagtgaatccaatttgctcatcaagtgagggtctgggccgctcgtgaccgtgagcacggctgatatatcagttttacactctgcagaggtgtgcactttcactccaagtcgtgattcccatttgcccggggtcgcgactccccaaaacacttccaaggtgagcaggcagggtttcactacgagacctttcacagggtccaactaataggatgccactcgtaagtttttgccggggcgcgcggcagccgtgcccatagcaatgggaccccgaactgaccgacctcttaatatgaatacccaagctacttccttacgcctacccggaaagtaacaccctaccagcggaggtcctgataattagtcaagccagagccatatagcctgataattagtcaagccagagccatatagcttggagctgcactgtaagtcccagggggccgctccctgactaagtccttacggagagcagagacgggtacgcccggcaaaccggaccaccaacagtacccgctccccctgtcctcaaccaaaccacgatgctcgcaagcaccgcaacatctccatcaccgaagtgaccattgttcaccatttaatcatttatcatcattgaagaattcattaagcaagatcattattattattattatatagattagatgagtagagcaactaagcatatctactgttcactatactacccatatatataaacccaggtatacaaggaatatagtagaagactagtcatgtccttagggtttgcagtattaagacacatgcaatggaaagtaaatgtatttaaagtttataggtacaatatgatcaaagggtgcctgcacttgccttaattcccagtgtttatctgctcagaattctttggcttctttttttctgatctccaacttctgcttcgattatcggtcctcagcgcctgatcttcaatgctgacgaaccacgcttcttctactcgtagcaaccaagcaacacaaacagacaaacaaacaatcatgactaagaacaagcatcaatcaaaagaaaagcttagaaagagcgcactaaacgacacgacttattgctacgatcgtgacaacgcaagaacgattgagaacggagctatcgttaaacggacacgactttcgaggttcggagtgtaacggagaagacgactatacgctggtcgtattttatttaataaaagaaggtgatagacttttagagaaatatctcaaagttgaattgaccaaattataaagaattataaaagatggagttaaactttagtcatattttaattgtagatggttatatatcatttaagccatttacgcctttgtaattttagaaaacataaagcaagtaagagcagctaatcaaatcctaacatgcgtcgcatgtatattaaacaagttataactaataaagaaccatttaagttgatattaataatgttaacatttatttatttataaaagatctaaattataaacataggttacttttaatccaaaaagacattaaataaatattaaacaaattaattatatactttatgtctaactaaaagaattataattaataaatatttaagttaacttcaatcaagttaatattagattataaaaatagcgaagtgtaaacttagattgtttttttgttaattaaaaatgacattcaaaaaatattaattaaactaattatatttataaacatgggacatggaaaacagtatcgctaataagtcatttacgttgccatggtcataaaacaatagaaaacatgattataactctatattgcttttaattataaaattaggtgcatatattaattaatctaatattcaattaaatatggaaaaaaatatatgacataataaaagttagcactactgcgtagagcgcgacgttacgaaactaacgcaattgaaacggaatgaaacagagttagaacgattgaatggcgaaggattaatgaccagtggcaaacttgtaattactttcatcttctaccttgagattttgtacggaccgaaccaggacaacatgctgctcgtgctgtgcgtgggaaggaagggctcggtcggaccttggccgcctggtgcgcggcgtgcagctgcagcgcggaggagcccacgggtcacggctgggacctgctcgagccgtagcaagtgggggagggcacgaggcctcgccctgctcgagcgagcacacggccggtgcgctggcggcgccgacgcaggacacgacgtcgcactggccagggcgccggtggccggtggcgtgtgatcaggacaagccgaggaagggccctaagtgccgaagaacgcaggaaaaacaaggtcgatctcaccggcaatggaggtttctcgccggagatgaaactggaagatgggaactagtcaaacgataatggattcgcccaaaaagaaatactacggtgaagagaatgacaagggctacctcttcatggtgatggctaacgccgggacgccatggttttgccggaaaaactcaccggagagttcgccggaaacctagcttttgcaaacttcggcgagagatggagggagctacgggtggcggctcgcgatgggatttttagatctgtgatcagcgcgacgagacgaacaccggcatatatataggtctagggtttggaaaagtttcaaaaattattaattacgggatttttagaaattcatttttagttcaaaataattccagaaaaagctgaaatcattttaaagccctgaaaaatatttccaaaattctaaaaattaaaggaaaacttttagagatatattgagagttgatcaatccaaaaaaagtttttggtgtccatgaaaaagaattttagagcatataaaaaaagattttgttctaggaaaatgggaaaaagttctgaaaaagttttggaaaattctcgggaaggatcggacggcgtctaaacgtgtttgtaaaatcttagcatgcacaaaaacaacaaacccaagtaaaaactagagcacaaagcacacaataacaaaacaaaacgcccttcacttttctttacaaaaattttagaatttcacatttttctcattttataatgacaataattaataaaataaatcttgtaatatttttaaatttttttaaatccttatttaatttagtgttttctaataacaatccaaaattagaaaattttggagtgttatatgggttatcctatttgtgttaggaaactacaaattgactgcttggtgcttttgttgagctctgaagatattttctggtagtattcaagagtagcattcaacttattctaccctattttttattaggaagctctagctgcagcttttggaaatggtttatctacagcttgtgttgtcaacattggtgctcaagttacacaagtagtttgtgttgaggtaataacccttgtatttttttaattattgcactaattgcatggaatgcaggtcttatttttagttccaggaaatcttttcttgaaactctatttagatatcaacataccatcttcccccaatgttttacaggatggagtagctttgccacacacagctttggcgcttccatatggtggagatgtatgttttcttgcacaatagattttcattacttttgtcgttctatccatatggcgtcattttctcatgtactatgggttttttttttttgcaattatgtactgctgtgcctacaatcgctttctactttatgcatccacaaaggagatctttttatttggtatgatgtgcttgttgtgttgataggaaggttggttgagggtgtggatggtctagggttgttgttgttgtgtcttttaatttcatcatcctattcacaacatgttattctcaaagggtgaaagatctaatcttcagttttgtcgaatgaactttttgtggtgtgtgtgactttgtttgtggattccccttgtactctcttttcttcctcgatgaaatgatgagcagctctcctgcatgttcgaggaaaaaaaatcataacatattatctacagatgcagcaatttctgccttattgctccctccagcagaaatctgcttctgcagttactctagtgccaaaactatgtataaaaattaaataaaagagtatctatggttcttaaagaagtcctaacaatatgacttactatttggcgcataatgtaggtttttggttcttagtctacatactgtacaaagcagagtaatagaactctataggtccagtttatttgattggtaggatgaaccttcttagtgtagcattagaacactacaaacaagttatatgtagaattatgttgtcttttcttcatttcgtttttgatggcttgctagtaaatggttgtgccctttgtttgttctgcttctgacttatatgtggtttggtccgtgtaccttttgttatttttactaactaaaatatacatagtcatttcaatgagtgaggaagtctgtagagaatgcgatatagagtcacatgattctttagtggaacagataattgcactaaaaaaagggtgcatccaatgttgaaagcgggtctactgaaattataatatcatagcacttagtatacattaactctgactaaagtatagtgggtctggggaagttaaattatcatagcacttaatatacattaactctgactaaagcatgttgtatttcaagctagtgataaatttggtcttggatggtgttactattagttttcaaaataatatgttcatctccctggtaaatagctgtctacattttacccttagtaactgcatgaattactttaggctgctgaaagcaccatctacctgtgcagtccactttctttctcaacaatgcgccctttgctaccttgtaggacatctccagatgcttgctttgggttcaacgtcgccatcgcacgtggccgaacttccaaactgatccagtgagcaagcctatagatctgctaatgctcaacaaaataaaagagtcatatagccaaataaaagtaagtggcttgttctaagcttgctcattcttaaactggtgaccgcaaaagaatttttcctagttggagtgttgtacgtgctacagaagattgcatttattacagtaatgaacaataataaacatgtaaatcttctgcatattatgttatgattgaattgattaactcatctgaaaagctgaagccagtcacatgtaaatgaaaaagaccatgtgcatccactgcttcacgattgtactattatgcatgctgactagtaaatctggcatgttgaaacccaacaaattctacttttcttttctttttcctagttaaaatctccatccttccttccttttatggtatttgagctgtatctgactgactgctccagttcatcaaaacattggattgcttgatatatgcaatgaaatcctagtaaatggccttgttgaggcatttagggccttctcatactttgtgaaggtaggtctggatctaaatccccaggatttagtatgaatgcaaaataagtcctaaaattcctcgagtaacccccatcttccaaacatgccttgtaattgggccttgggctgatgaatcatttcatatagcttgctaattttttagtgtatcatgctttttaatgtattattcccaccattccaaatcataaatcgttttagttttgtcctaagtcaaacttgtctaactatgaccaagtttatggaaaatatattaacacctacaatatcaaataagtgcgctatcaacttctcatgcgagttggctggtatttccatgggagcagtgatggagctggctagtcaggttcttggtgtggttagctgtttgtttctctcttctcgtacgagttgcctcaggcaagagcaaaagaaaagaaaaccagaggtcaaagtggattattttttccctgtaaaacaagaatctggctgcaggattctggaagaaaggaattggcgtttagccatttactttgttccaaacgttcattctcactccctttcctccattattcgattcctgtatctttcctttgaatttctacaatccaaatggggccttggcttcgggtgaagctaaaatgatttacaatttggaatggagtaagcacagcagagaaagaaatccagtagaattgggtaatgttttgctgaagaaatgtactacacttttaaatctggatctattttcttttctacattagagtctgtactaccatgctctatgtgaaagtgatcaataaaataagaaaaagttgtatttttttgcctcaaaactttttgtggtcatttctattgctttcacaaacaattgaggtggaataattcccttattctagtacataattttttccttctttcagactgggagcattgatgcagttgcgcttgttcattcatatgataatgaaagatctggtggacatcagaagacaaaactatcagctcttaatgtaattccttgaaggcatacattatcttttggtcttctgactttccttttatttccttgctgctgttgtcttttcagacatgtcttacagaaatgagcattgtgttcatgcctgccatataaaaataagctccctccctctatctgtagggatggggaagccctccctctatccgctcaggcgctcacttgatctggaatggccagcaatgtggcgggctgcttgacactggcgtcccccttgctggtgtcagcacaaccgtgccatggcctcgcgctctcacctgtctcctcactcaattgctagtggcagcattggcaggcgagtgagcgattgcttttggctgcagtgtgcagtgtgattggggataggagtagggttccaggagggtgtaggtcatataagatttaataaaaaagggctgttctgcatatacgtaggggggccagatgagtgaatttggagcttggacccagccccgacctgaatttggggcctcacattgttagcccacacaggggggtgggatgggtggggcaacggagcagatccctgtctttaagggaattttgccatccctatcctccgtaatgcaggagaactgcgtttcattatatttagaagaaacagaggggggtctctctatttaaacatcctattggattgttgcaattgatgttccagcaatttactctaagttgtggaaaaaataggttcctcctatggggcttctttacccaagggttcttgttccagaagagtaccctccacctcctcgatcttggtgagttttattttttcagttttggtgatcaggcttcgaatatgatatgattgctttatacgagttgtgcatgctcccaggttccaagactatgatgacatgttggaggatacctggcaaacaagtgatggtctttaccctagtgggaatggtggatttggcatgtgggacagttatccagtgttttccactagattaaagaaatttgagaacattggcctcgtagaggccatcattagtagcgttctttcaacaggtagtgtttttattaatatatcgcttacctgaaatataaacttttctttaacagaaactactgattgcaggacgtgttgaccttcaaaggaagctgttctgtagcattcagctggtaaagtatctggattactttttccaataaacgaatacttctctgttacttggtaaagcggctaagctgttctgtgcttttcaggttggtggtgcagcttctacagctggccttgcacaagtgctggagcaaaggtttgttagatgtcaatcggcttgtcctagcgttgtttcatggaacagtactggaataaatttgcaaaagcctacaaacatcccactatgtgtaaatagtgcacaagtatagtgattgtcatttctttcctttttcttgtatattttatactcttcagccacagataattgactttttggacatcaacacagtactcaaaatgtatgttgatcactagtctatcatgcaatgtgtctacaagttgtaaaatttatggtcaaagttaccttcaaaagttttttgatctcctaaacttttcttttcagggttcgcactaaaatttcagcaaaccaatctattgagaaagttgaggtgtgccctataaacttaaagacgtggattggttctttctctttctttagcgatttatatgtagttgtgtcataatgataggtttgtccctggatttacgtcatttctattagcgattgatgtttgcgagtccataatctacattattggtctgttatttctttctttttaactcttcattgaaaatggcaggtgttgcaatctaggacttatccattatttgttccatggaaaggtggagtggtaagtcagactcttctcagttgaagtatgttgtccatttttcctacatagcttgggtgaacttttggtgcagcaaactcaatatggcattagagctaatgtcctagttttatacactatatataatggtaatgtgttttcttgttcattgattgctcagaagttaggactagagtttggacaatgtcagtgccctgtggctggtctaatttcttctttccactgtaaattgttctgtaaaatactttcttttctacgtttaatatgagagggtctcgggcgctcctcaggatatactccctctgttcttaattataagacgttttggcttttctatatacatagtttttgctatgtacatagatatacactatgtctagatacatagtaaaagcaatgtatctaaaaaagccaaaacgccttataaaaagatggagggagtggtggtaacaacttaacagtatgtgctaataaaacaaaccgatgcaactttttttagaagagaattttcctttttaaaaaatataaccatttccccctcatgtccaagagtataagattaatcttttttggctctgtatatatgcgctagacatgcaaagttgtaaaaataggcatggcttgtatttttggacagacggagtagttttttctttcattgaggaaagagcattcatgtttggactatcttaatcatgggggacagtggtagctgaaccaatgaaaccgaaagcccagaaactgacttggccaggcaccttagtagatagctcatgatcttgttgacccgtctttcaagccaaacaaggcaacgacgaaatgcacaaatacaatttgagtttaagtgccatatcatgtgccaagcaaggatttctcttattttattgccatgccttctttttagacaatattaccaaattggactgatgattgatatatgggctgggtctgtctgatgacctagcctttatgagcctgagaggaaatccattgctaaaagtcattcagttggttagtccactaggtcttgattacagagattacgaagattagattttgattgatctcattgtggttgttgtattgtacgttatccacatcaacccagtgtttgtaaaagtggaactggtgggacttgtaccaacttctaaaacagtccatttaattaaatagaaaatggaaccagctagtactaagcatgaacttgaactaaagataagataatccatgcattaaggaaccacagttttgtatcaactttgctgtgggcaccaaagcattcactaaaaagaaaaggagggcctgtctgattttaggaaccgggtaaataaagaacagtaacagtaggatgaaaatgagtgtgatgtatcttgtcctttgtttccccttttatttatgctatgttccatattcctggatccttactctttcattgcagattttgggtgtccttgatattggtagggatgcatggattcatagagaagactggattaaaaatggtgtccacatcgggagtggcagaaaatataaggattcctattttcttcaggcgcaagtaatgtgctactacaatatatgacaggtgctttctctctgtccctgtttgtgttatgtacatgttataaatattcatgcaatcaagtattgaccaagttgtatcctaacatctgtgttttcggtacaaagaatcatggtttagtttcatggaatggctcttgatgctaatggatttcttggaaggaatttttaggactttatttcaaacagcatgattatcagatccatttcattgtgaccttgagtttggtggatgcttttctttctttaacatatgagcctagttacgcattagattagacatacgaaaacaaacccaagcccaacaacttggctgtttttggttaaactggtttgtgcatggaggtcaataattcttatcaacttttttctctatattatattatcctatcttattaccgagcccctaacacatcaagatatacaggttgttcgactgcaaaccatcttagaacatgatcggtggactgcgattaacttgcgtacacgatgcatcagtttcattgatgctggctgctgtatttttgggttcggaggtcggtcatcaacccgagacctggactaagggctggttgttcgctcaagcactttgatgtttctgttagaagtacaccagtcttctggcgttctaaagatgtactagtataacatatagtactcaaatttctacagtaatttaattccttgccaatggtgttacctattgactttgatttgcggatgtttgggttcgtagtttaattccaatgatgataaatatataaatgcattctcagccctttttgaaagaa

SEQ ID NO: 135 - DNA, 9006 bp, Zea mays
  source 1..9006: mol_type = genomic DNA
gggaggaccaagcttcgtcgacgtcgactcctcgtcctccctcacctcgctcgcttctctgcaattctccgcagccctcctctttcggtctttcccgctggcctcctcttttcaaaaccctcgctaatctcgtgccccgtcccacccacctctagcttcgaatcctagcgcctcgcctccgcattctagggtttccccgcctccggcgccggccatggaggcggtggtcgtcgacgcgggctctaagctgctcaaggccggcatcgcggcgcccgaccaggcacccccactggtgagcacgcggatctctgggacgcctctcagtgcactgtgtttttttagttatttgaccttctattttgctgggggccttttgctgggtaggtaatgccgtcgaagatgaagctggatgttgaggaccaggagatggctgacggcgcggtggtagaggaggtggtgcaccctgtggtgcgcggcttcgtcaaggactgggacgccatggaggacctactcaactacgtcctgtacagggacattgggtgggagattggggacgagggtcagattctcttcaccgaacccctcttcacgccaaaggtgatgcatcctcctgctcgaatagagcttgtcgagaacctgaaatcagtggcggacgcaggacgaaaattcatgggggccaaaaggaccacatgagagccatagttttctagttcgccaagcccgccgaccgcaggggacaagtcatatcgttgcgacaagcgagatctagcctgtcgagcggatcaacgtcacgataaaaacaggacaagggacggaggcgccgggaaggggctaagtcgggtggcgtcgcatcgagaaggggtcggcggcagaaacggggcagcgagcaggctggtttaggtggtgtcgggaagattagggtcagactggtagatgcaaggactggactgagaggatccgacgagcaggctcataacatggttgttttaggccatgttctaaacctctagagctaactgttaactggttttagctgggttgggtcatctaacaactaatacttatttgaggggtatagctaacaattagttgatccattctaaacctctcacctaattttagcaactagctattagttttagagatttagaacaagactttatactatctaaaactttgtttttttctacacttaatactaaataatcattagacataaaaggatgtacaaaattgaggggggggaggggatggcccactttgccccccctttagatccgcctctgcctgaaatgcttcatgttgcagccttgctgttggggtgtggttatggtgtccaatcgtgaccccctgctcgaatgaagctaaaaagcttgtccagaacctgaaatgcttcatgttgcagccttgctgatggggtgcggctagggtgtccaatcgtgacccaaattgttttaggacaactaaatatgctgaattattaatggactagtgtccagtggtgcttttttttggcttggcttataagttgtggctagcaaacatgctcgtatcttgcaacagaacccaatacgtatcatcgctagatgcgagttgttccaactcgtatgagcgtgggtcatgagttcgaatcacataggaggtacataggatgcggccctatacatattggaatcgaacttcgtactcatcactgcttattgcaagttgccctaactctatgatggtacgaatatgggtcatgagtttgggtcatatacatgacagtgacacagagggcatgagtgcactttgggaagtaaaataagcagacatacagggcatgagtgcactttgtgaagtaaaataagcaggaccgaagaaactctccatcgattgggtactcagggggagttgacgaaaaaatgggcagagagaaattttacctctttaacattattatattttattatttggtgtagatatagattaattaggttggggtattctagacatgtggcttgaactcttaacccaggtttttttttgtttttagatgcttctttttggagttctgtgatctcaaaccttaactcttaattggatggtcatgctatatgtactctaaactttgatgccaaaccttttgctatattggggatgtgtctgcatagttgatttaatgatcaatgaagtgtgtaacagtagttgaactatatggcagaacaaaaaaaaaagaactcggccggggaggcaatgaccgtcctcccggtattacattaagaagagaccgaaacaatggtcctagtcgagaaaatccccaaaccctggcctcccatcactaacgggctgacgtcaatcgtccactctgcaacggctcaatcggtgggtgacacatgacatcgtaacccgagagcggatggggcacaacgaggggatttttttaaccaagcccggaaaattggcccccgaggggaatcgaacccgagacttggaggtgctactcggaagcctttaaccactaggctagaccgctagaggccctacgagggctgatgtaatggaccccagtattttgtggcttctgaagcctatgtttaatgtcactgcaaatcttggtgttgtatgggatctgcactagagctcactagaaagttgaactttagcctctaggtcaaattcattttaatttaaaattttggacaagctaagattaaatcaatagtttagtgtatctttgtgccagctaaaaagtattcaataatggtacctggtgggcttttctggtgtgtgatgttttccaaatgctgatattatagatttggaggcatcatagcagcacatgtttggttattgactgatgcatcttctaagtaggctttggatatatgggagctgcaaaataatatatcttgtactgtcttaatttttttgtctgccattgttcattttttggagtctctaatgcattgctctagtagtgcttttgtacatttgaatttgattatagttgtcccttgtcctcacatctcttaatgctctctgcagactcttcgggagcaattggtgcagcttatgtttgaaaagttcaatgtttcaggcttttatgcctctgaacaggctgtattgtcactctatgctgttggacgcatttcaggatgtaccgttgacattggtcacgggaaaataggtagtaccttaaaatcaaagcatctttaactttggatgattcagattcagatttcaattatgtttattcaattattccacgtctggcttttgtttgtgtagtaatggtctgaagctattgaccttttccttcatttattttggtagaagggccatcctttacctgtagattttgactcagcggttgtttaattcagtcctcttgtcagcttcactgctgtagatttccttgatgcaaaccagcacatgtcgaaggcttgcatcgaaaacatatatgttcccttttgagctcaaaagttatacaatagaaaaaaatgtcacctagtgattgatgatctttcaggatacacaagaacatcacgtaaattctttatccaatcaattttcaggaatgtttatattgcaatacaaatatcaaaaggttatgggctttatgcaattaattaatctagtctcttgaatgaacaatagtttgtgtcatactgttgtaatgtcgtgctggtttcatttgtgtatctttgctaatattttaaaaggcggcgcctagctccaccttagtgctaggtggagctgcatcacctcacttagcacctagatgttttgtctaggctttttatgcatagagatgttttgggcataatgtctgcttgagaatggaacatattagagatggaggaagatgagctccagtcatatcgctaatatcagtttttagcaggattattctaattatccacataaagtacaaacacaaagcatcgcataggcactaggcgtagcccgaccgcctgcctagcatgtttctgaaacactattttttgcatattgctgtgccacaattctttcacctaattatcgtttacctttttgcacagatgtattattgcattccttgcacccaaatgagtttctgtaggtttttaaagcaaacaattaccagcattttattccaacttggttgccagttgccacttaagagttaagatgaaattaaatgtagtaaatggagtttttgataggaagccatttgagagaacaatacttatattgcatatagagattgaagatataaaatgatagtagaatcatttcaaaaaaagtaattccatattataaataatttcataaatataaattcgacctgcggggggtaagacagccccgaccccgagtattgtattaagaagaccttctcacacaggtcgagaaaacccccgaacccctgccccacccatacacatcggcatcgaagctcatgtgagaacgaccgcgccggggccgagccttagacctgtgctttggcgtgagacaaacgaggggatttttttaaacacaacttgaaattcgctccgatggggagtcgaacccaggaggccaggacattgttttcagatcatccgactaatcgcgattagtcaggctgatcggtactcagtgctcgataagggggttcgattcgatcaggtgatctgattgtccataccgtctaactagtcggcgatatgtatcgattagtcgtctggttagcgatcagtcgcgttaattactcaggttcagacttcagttaagacttcagacttcagttgtatgatgatctcatataggtgttgccttcttggtcatggtctagtaagttgtagaattgcagtttcatagtttcatatagacttgttggagatgtactgctgttttggactattcaagtattcatactgctgttttggactatttatactgctgcgttgtctatacttgtgcttgtcctgagcaagtctatgtactatataagtatatatctatatatagtattatatatgtcctaaaaatacataggacgaccagaggacgattagggtcgatcaggggcgactaatcgtctgatcacccagtggcatcgatcagacgatcaggcaatctgaaaacaatgggccaggacttgaggagtgctactcagaccacctaaccaattcagctagaggccctttcgctaatttcataaatataacataggtaaaatgccaaagttgcatctgaataatgagtggatgcctggaacaacactcttcccttgccaaagggagcacattatattatgaagcctcacatctaacaaaataaccaaaagataatagtagacctgaagaaatagtggataatgataacacctgcttcacatctttttaaaatcttgattttttaggtgctagtgactcccagggtatgcatcataattatactcatcaccatcattgttattaaaacgtcgtttaaacgagaaaacatgtttaaaagttgaaacgtccgaacgttgtttagggcgtagaacgtccgttttgagcgtttaaacgacgtttaagcgtccaaatagcgttttagggcgttttaaacgttctaaggacgttctgtccgtccggggcctttagcattttctaggtcatttcctgggcactggccgcagtgccctcactccctcagccagctgccgtcgctctgctctcctctctcctctcctcagccacagccggccgccgccctcttcttctgcgctcctctctcctctcctcagcgacagtcagccaccgctctcctctcctcagccaggcagccagccactgctctctggcgcccacagcagcccagcgccccagccgctggccactgctctctggcgcccacagcagcccacccgcgcccacagcagcccagccagcagccgttgctctcctcagtcagcagaccatattggtgagtactgattttgtgcaaccatattgcccaacagtgaatcaatcgttcaagctctatttgctcaaccaagttgatgaagctattggtgcatctgcacatctcagaggtcgtaattttcctaggagagctgctggtgggtgtgtaagaaggaatgaagaccttgaggaagaggatactaatttagcaaatgaaggtgacgaggatgaggaatatattcttgatgatcttgatgtggaagatgaaattgaaggaagcaatagtgaaaaagatggtgatgatcaaggcgtggatgctcatgggtcttcatattgatgagttcgatgatggttattgatcatgcataaaagatgtaacttatgtggttgaacttgtgctgttgaacttgatctgtttctttttatgctatttggtttgtgaactcaacttatgtatgaacttattctatatttgaatttctatgtcaagtctgaaaagacgtttcaatattcgtttaaacgtttaaaagttaaaaagttggttcataacgttttaacgttttaccgttttaataaccatgatcaccattaagtccgttagcacagcaaaggagcagggattagaagatttcttgaactattcgttcatttacgggaatgtgactgcatacttgtgctttaaaactgtttatacttgcatttatcttgcggttatcatttccttagtctttcaaatctcacttattttgggcaatttgtttagtggcttagttgactacgcaaaagacacgatgcataacgaatcttttgattggctagctttaactaaagtagacattgcctacattttggttcagttatggccatcaagtgcttgttttatttcactaattagtatgtattctcactagacccttctctatagtggtgggcaaacaaggctgatgttggagtgacattttctgcttctattttactagatattgctccagtttgtgaaggagctgttcaacacatagcttctaagagattagagattgggggagttgacttgacaaacctgtttgcacaagaactgaaaaaatccaacccatcagtaaaccttgatgttgctgatgttgagctgctgaaagagcagtatgcgtgttgcacagaagattatttgacttttgaaagtatagaaagctcttgccaaccagaaaagcacactcttcctgatgggcaggtaggttattattcattttctgccgtaaatcttgtgtcaaacatacaagttggtcctctcttattgtgtgtctacataaatgcatggttattgtgtccttgcctcttttcttgcttttgggtccaaatacagtaacgaatctatacaaactagtcttttataaccgctttttctccaggttataacaattgaaaaagaggggtacattgttggtgaagctttatttcaaccacgtatattgggcttggaagattatggtatcgttcaccagctagttactagtgtctcaaatgtttcatcagagtaccatcgtcagctgcttgaaaataccatgttatgtggtggcacctcatcaatgactggttagttattgatttcatatgccagatgccttttgttctttatgtgcacctttgttttattcaacattgtgagctagctatatatcaaatgcatatctattagctagatagggtaagtaatactccctccattcacagatatatgacgccgtttacttttttcaaaaactttaatcactcgtcttattcaaaaaatagtaagttgtcatttattttgttgtgatttgttttatcactcaaggtcgtttgagcatagcttaaaattttaaaattttgaataaatattttaaataagactagtgattaaagtttttgaaaaaaaaaatcaatgacgtcatatatttgtgaacggaggtagtattcttgttttatacttctgtggatttaacatatgttttctagttgaacacaacttcattcaagatgaaaatctgccttgggtatgaactgattgtgtggatgccaacctatgcaccactagtctggtacattctctgttgtcatgtctcctaataaaagaagtgctagctttgatgttttgttggaactttcagatttcatttgatagttgtcctttggataagtagtcaaatatcatggtgaatacgggtagggttaagtagtcaaatatgttgaatatgggtagtaatagtacaactggaagtggaaagtatgttggttagtaagaattgggttgttgaagctgattcttgatattgaaataagcatttatcacacatttcatgtcatggttacagctttgcatgttcaactgactctcttgaacagttgcgtatacaacttgtccatctttatgcataattaatctgaactcctgtagttttgcttagactcgtttgatcgctaaggtttatctcacttgctttcctcaaggctttgaggacaggttccagagagaagcaaatctgtctgcttcagcaatctgtccatcacttgtgaaggtaccttcattgctgctcctagtcaacccccttctcacttgcctggctattactaacttgggcaacgtttcctccagcctcctgaatacatgcccgagaacctagcaaggtactcggcctggctgggtggtgcgatattggctaaggtcgttttccctcaaaaccagcatgtgaccaagggcgagtatgatgagacggggccgtccattgtgcacaagaagtgcttttagagacaaatgccttgaactagcacggttggtgcaccatttgctgctgttcatgtcgcaggtgtcctcgtacctgaacgttgcggccttgcgggtgctgatgcagcgatgcttgtgtctacaccttactccagccacagttcatacctgacggttgctaagtgttgatgcatctagctagctcggttaggatggattggcccttaggtttatttagagtggaatggagtgtagcctcggcatgtattccttaggagttttagccaattgctcatttgtacctgtagtaccagagaatttcctgagttgagatttccttttaaatttacattatgatcc

SEQ ID NO: 136 - DNA, 3407 bp, Zea mays
  source 1..3407: mol_type = genomic DNA
aagcttcggtccggcagccgccctccgccaaatccgcccgctggagccctccgacagatttttatcatcgggcgcccacgcgtctccattgacccgggcaggggcgaggtcaagagggcgaaccgttggccgggtcgcccccgctatcatgccgtgctgtgacacggcggcaggcggcttcccaacgacgctgcgtgcgcacccgcgggccgcagccgccccaggcgcctgcataccagtccaaccaggcggcctcgtataaagaggttccccacttgggctgccgctctcccatttgtctcgcgcttcgctctcacgctcgcgtcaccggagctctccagaaccgaaccccaactgcccaagggcgagcgatccgaacccctcggcggcttcgtcaacgacgccgaggtatagccgtgtcccccccccccccccccctctgatctgccatcgattcgatccgaggaagcgatccgttgtagacagtcggttcgatagatccccgctcgaccttcccgtcggtgttgacttcgattttttggtgtcgattttgctgtttttgtcatgctcgtttcggctctgggattcggataggtggtctggtatggtgtaaattgatccagcgtaacgagcaaaagctaccggcgtatgtgtagcgtagtcctgtactcctactatgtgtcctatgatttctacagtacctctgttgtgttttgtttgattggattctctggtttatgtgatggaagttaaccatgtccagttactcagtcagttcatgggagtatatatgattcagagtgtgttgagttgcatgctatgctggtccgtagcagagtagcggaaccggaaaattgctctcagatcactcggtgaagaactggagatgacttcaagcagtgaaatcacgctgtttctgttgataattcagacgaaatgtggctcaaacatctaattaaccattttcctcaacgaaactgccccccctgatcctcctacccaaataggagtgtggtttcagacgattcatgtaatgggtatatatatgtgatatgtttgttggccataaaaaaaatgaaacgtgcatggtctgatctctgatggtagcagacaaatttacggcctatcaagtatcaagataatgaataatttgtattatcagatagcaccgaagtctgtctctgcgaattgcttaaaagtttatacttgcatgagtcgagtatcagttttctttaacacggagtcaagttcagttgcttaatcatgaacacttgtgcaccttagttttggctgatgactggcatgttgcaatttggtgtcatcatacttttttgtggggtttatctgactccatggacatttgaaggattaacactgctgcagatacattcaaatacattctgaatatagcattctgctgcagaacactttgaggaatggctgaagaggatgtccagccccttgtgtgtgacaatggcactggaatggtcaaggttggttctgctgtccggttgtcaatcctttagctaccatacatgtgtttcagttttcttttgcctgtttattcatttctgatttaataaactgatgggattttgatgccaaacacaggcgggtttcgctggtgacgacgcaccgagagctgtctttcctagcattgtaggcaggccacgccacactggtgtgatggtgggcatgggccaaaaggatgcatatgtgggcgatgaagctcagtccaaaagaggtattctgacactgaagtacccaattgagcacggcattgtcggcaactgggatgacatggagaagatctggcaccacaccttctacaatgagcttcgtgtggcacctgaggagcaccctatactgctgaccgaggctcctctgaaccccaaggcaaacagggagaagatgacccagattatgttcgagacattcaactgcccagcaatgtatgtggccatccaggccgttctttccctgtacgccagtggtcgaacaacgggtatgttactgcattaaacctgtttcatatcagcattcgaataacagtgtagtgagtgacaggaatctttctgcaggtattgtgctcgactctggtgatggtgtgagccacaccgtccctatctacgaagggtacacgcttcctcatgctattcttcgattggaccttgctggtcgtgaccttaccgacaacctgatgaagatccttactgagaggggttactccttcactacgactgccgagcgagaaattgtcagggacatcaaggaaaaacttgcctacgttgcccttgattatgaacaggagctggagactgccaggaccagctctagtgttgagaagagctacgagctgcccgatggccaggttatcacaatcggtgcagaaaggtttaggtgccctgaggttctattccagccatccttcattggcatggaatctgctggcatccatgaagccacgtacaactccatcatgaagtgcgacgtcgatatcagaaaggatctgtacggtaatgttgtcctcagtggtggctccactatgttccctggtattggtgaccgcatgagcaaggagattactgcacttgcccccagcagcatgaaggtgaaggtggttgctccgccggagaggaagtacagtgtttggattggtggttccattctggcctccctcagtacctttcagcaggttgttaccctctcaaaatctaaatgtgacgcttctgcttgctctgcagtctattgtatttgaaatctgacgtagtcttgttattgtgttgtagatgtggatctccaaggaagagtatgacgaatctggtccgggcatagtccacatgaaatgcttctgaatttctggagcagtatatctgttgcttgcattttcagttagttgggatgcaagtttgtcccgtggtctcgctagcattcttcgttctttctggatattgaagagctgttggccatggagcattgtgcaaggtggtaaagtcgattgatggtactacatgaagaaacatgtgcagtacttcagcagtatagatcgtcaggtcagtttagtttttttttcaacaacagtgccatattaggatgttcctgatgtgcgcagttggtctgggtttttacacaacgcaagggtgtcggctgtcgcccgtgcagtttgcgtctttgtgagatctgggtccgtttctgcactccagtacgtggaacaggtttcgcatttggtggccagtgccccagcgtggcgtgagtgttgatgatttgaacttggagctgtttgttctattcctttcatgaaacagatattatcgtttgtacagggataaataataaattgtttatccttcaaatgttttagatactgttggaacaaacttcgtttaattataatctcttggatttaa

SEQ ID NO: 137 - DNA, 9554 bp, Zea mays
  source 1..9554: mol_type = genomic DNA
cacctgtcaacaggcagcgaagcgcctggagactggagtggagagcggagagaaggacatgcacggagacggaggcgtcggtggcggtgtcgccatcatcctgcacgccaccagcgacgaacacgcacgcgacgcgacgcagccttgtcacgccaggacaaatccagcgctccccaaagcagaaagaccgcgacccaaagcaagctcaagccgctccgctcctccagtctccagtctccaccgcccgccaaccccgagatatacctcccttcctctcgaagcttcgtctgcagacgaagtcgccggctcttccctcggcgctggtgccggtgggttgcctgtggcggtgggtgggtggccgggtggtggtgttgctgggatgcccgccgcgacggcgaccgcagcccgcctccgcgtgccgctgccaaaagccgcccaccactcgccctgctcgagccggcgccaccccgactgccgccgccgctgacgagacgagcggccacacgcttggcgcgcgccatggatgccttgtcccgccctgctgtcgtcatcgacaacggcaccgggtacgcccctcccactccctagatctgcgcgcggaggcgcgacggcggtgagccacgctgctgatctgttccggctctcgcggcaggtacacgaagatggggttcgcggggaacgtggagccctgcttcatcacccccactgtcgtcgccgtcaacgattccttctccggctccgcccagccggcggtgaggggcacccccgccagggggaactggctcgctcagcacagcgccggcgtcatggctgacctcgacttctacatcggcgacgaagcgctggcccgatcccgcgccagcagctcgcatagtttgagctatcccatccgcaacggccaggtgggcgctccagctgtgtactgccgtgtccagttgctggtgtttttttttcgcgaccttacttacgattgatttgggctggagcgaactctttcaggtggagaattgggataccatggagaggttctggcaacagtgcatcttcaattacctccggtgcgacccagaagatcattattttcttctaactgagagccctctgactgcccccgagacccgggagtacaccggagagatcatgttcgagacgttcaatgtgcctggcctctatattgcagtccaacctgtccttgcgctggctgctgggtacactacaaccaaggttagtcatcggagcttagccctgcacttttgcataggcatgcctgacactaaaatggatggcaattgcattcagcaggccatgtttcagtgtacttgaaaatgtttcatcactgtttctcttctttgttgagcgatcatcacactcttatatttatgagaaacttcatgctttgttttcagtgtgaaatgacaggtgttgtagttgatgtgggtgatggggctacccatatcgttccggttgctgatggttatgtcattgggagcagtatcagatctattccaattacaggcaaggatgttacccagtttattcatcaacttctaaaggtagcttcctctgccttcttgttgactgtagaaggacactactcaacttgtctagataacggtactatctacatttaacggtaaaatatcatgtgcaatcgtgcaatcaacgaatctgaaacattaagggcctgtttggtttgatgcctaacttgccacactttgcctaacttttctgcctaaggttagttcttcaattcgaacgactaaccttaggcaaagtgtggcacatttagccacgaaccaaacaacccttaagtctgtatccaatggtaactgccgttatatttatatcctttcacctcgcacaccgttgaaatttgccaacccccccccccccccccccccctgaaatagctaccgtcagatatagattgaacatctcatattggatgattgcacagatatgagtgattgcacacgatatgtccccgagaatagaaatatgaaattgtggttcatctggagaagcagctatcttaatggtatatttgttgtataataaataataatatatcaaacaataagtttcacttgaacattcattcaagaaaaagctccacctgaacatgttaatgatagccgcatcatgcaataaaaccgcagctgctctctctctctctctaaatgcataggtttgttggatttgtagaaaggaagaatggactgaatcaccacacacccattgagggtggggagcctgtcatatatagccaataggcatgcatggaaagtacatgtatggaaggctattccctgtacaaggaaacagacctaggctatagatagaaagtaatcctaggctatacaaggcagctagccaatctaggggattacaatcaatcgcaatcaggctctgattgatcctgatatatacatatcctaatacccgcccgcagtctgagcgggagaatcacggacgcaaagactggtccgaaaatcggtgaagagctgtacgggcagacccttggtcatgatgtcggcaaactggtgcgtagacggaacatgaagaactcggaactgccccagagctaccttctcacggacgaagtggatgtcgatctcgatgtgcttcgtgcggcggtgatggactgggttggctgccatgtacacagcgctcacattgtcacagtagaccacggtcgcgtgcgggatggagatgtgcagctcatgtagtagctgacgcagccagcagcactcggcaacagcatgggccacagcacggtactctgcttcggcgctggagcgagaaacagtcgtctgacgcttggacgaccatgacaccagattgtcgccgaggtagacgcagaagccggaggtggagcgacgcgtgtcggggcagccggcccagtcggcatcggagtaggctgtgagctgatcaacggcgccgggtcccaagtgcagacctgccgacagggagcccttgacatagcgcaggatgcgcttgattagcgcaaggtgtggctcgcgagggtcgtgcatgaagaggcagacttgctggacagcataggccaggtccggccttgtcagggtgaggtactggagagcaccagcgaggctccgatactccgaggggttggcgactggagcgccctcggaggcagacagcttggtccgggcatccactggagtagctgtcgggtggcattcagacatgccagcgcgctggaggagatcaacggcgtactgccgctgagagaggaacagtccactgctgtctcgtgtcaccgagatgccgaggaaatggtggagatccccgaggtccgtcatggcaaactccgacgataggcgggaggtgacgtgctggagaagagctggtgatgatgcggtgatgatgatgtcgtcgacgtagaggaggagataggccatggcgtctcccgtcttgtagatgaacagggaggcatccgttttggaggtggtgaagccaatgcttcggatgaagctggagaagcgctgattccaggctcgcggtgcctgcttaagcccatacaaggacttctgcaacaggcagacagagttaggtgcagcggggtcgacgaatcctttcggctgctcgcagtaaacagtctcctcgaggttgccgtggaggaaggcattcttcacgtcgagctgccggatgggccagtctcgggacgcagcaatgctgaggacggtgcggatcgtggccggcttgacgactgggctgaatgtttcgtcgtagtcgacgccttcctcctgggaaaagccacgaacgacccagcgtgccttgtgccgggcgagggagccgtcggagtggagcttgtgtttgaacagccactttccagtgacaatgttcgcaccaggcggccgaggtacaaggcgccaagtgccgttgtcgatcaacgccttgtactcgtccgccatcgcagcacgccaatttggatcggccagggcactgcgatagttcgccggaattggcgaggcgacggaggcggagaagccgaagcgctggacagtgcggagggagccagtctgtgagcgtgtcacaggccggtttgctgcagtagataggagccgagccgctggagccgctgggggcgaagctggtgcagccgctgttggcgctggaggtgcagcaggcacaggagccacctcctcggtgaccggtgctgctgggggctgggcgcggcgagtgtaggtgctgccgaagcgttggccaccaggcggaggagccgccgactgccccacttggggccctcgagcgcccagctgtggcccgcccgcaggatgaacccgggggccgagctgaaggatggccgggtctaggagcacctggagatcatcctcgctgctggcagcgagcgatggaggagtgcttgctggtgccggcaaggaggtgaggtcctgcatcagaaaatcaagtgacgacggcatggagcccgccgatggtgcagccgagaatgggaacacagactcatcaaaaatgacatggcgcgaggtaatgatgcggcgagtggacatgtcaagacagcgatagcccttgtgggaagatgggtatccgaggaagacacaaggagtggatcgaggggcgagtttgtggggggaggtggcagtaaggttcggatagcagagacatccgaagatgcgaagggaggcgtaatctgggagtgtgccgtgaagtatgtggtgaggtatttggttttgtatggaggaggaggggcgcctattgaggaggtaagttgctgttgcgagggcctcagcccagtatggaggtggcatgaacgcatggagcagcatggtgcggatggtgttgttggtagtgcggagcatgcgttcggccttgccgttttgtggtgaggtataggggcaggaaaggcggagagtaatgccatgactagtgaggaaggaggtggtggcgtggttgacaaactcggtcccattatcagcttggaaggatttaggtgtggtaccaaactgggtttgagcgtatgcaatgaagtcaatcatgtggcggtgcacctcagatttgtgacgaagtgggaaggaccagctgtaatgggaataatcatcgagtataataaggtaatatttgaacccagaattgcttagtacgggagatgtccagacgtcgcagtgaagtaaatcaaacggagcatgagttacagatgttgaatgactaaatgggaggcgcacatgcttgcctagttgacaggcatggcagaggcatggcgagtttttattgtaggaaatgaccgacatgctgcgaagtttggcgaggctggaaggaccggggtggccgaggcgatgatgccacaatgacgacgtggtggcgaggctgcaggagggagctgtggtggaggggtaggtgtagaggtcgccaccactattgcagcgaagagtcacgcgccccgtccggttgtccttgacagaaaaaccggaagcgtcaaattcaattgaacaagagttgtcacgggtgaattgacgaacagaaaggagattgcgcacaagtgcaggtgcaaccagaacattgttaagacggtaggtagaggtgggggaggagagtgtggatgtgccacggcaggtgataggtatggtggtgccatttccaactgtgatgccgaatgggggaggggggagacgggacaggagtataccagccgaagacgacatgtgagttgtggcgccggtgtcaaggacccaaggagaggacccttggagggacatctggttcagtgtggctatgaggccagcctgatcccagccgccctgctctgccattggtggagcagggttgtcggagtactggacaggggccagcgcagtgtgcgcctgggcctgagtgaaggggccgaggatgccaggactgcgccaggctggggtcggcaccggcgggcgccagggctgctgatgcaccccggcggtccagggggggtagcagtaccagggggtggcaggaaacctgggaccgccgccggagtgggatccgcccttgcctttcttcttccagcgaccgccgccaccacctgggttgccgccgctgttggagcgactgccgtgaccgcccggtctgctggctgtggaaccgccgccgttggtggtgggggcggtgcggcagccggtgccgcatgatgcgtggaacgccgtctggtccgcaaccgtgccttcgttggcgaggcggagttcctttagcacgagcttctcgcgagtggtggcgaagtccggcagcgggtgtgagtcggcgatgttgtcggcggtgctggcgaagcgtgggttgaggccacggaggaggttgaggacgagctccgcgtcagtgatggtgcggccgacatcgcggagcgcgtcggcggtggccttcatgcgctgagcgtagtcgttgatggaggagtcgccctgagtcatcgagtgaaactcgtggctcagaaaaatggcgcgtggagccttgttggcctcgaagaggcgctttatggcgacccagagttcgcgcgcggtctggtttggagccgcggcgaggccgatgacgtcgggaccagccgagccgagaagccagctgcgaacgcaggcatcggcgatgccccaagaaggatctgtgggacgggcttcctgcagtccgtcaatatgcgagaggagagcgaatttgccacagagagaggtgaagaatggtgcccactggttgaagttgggttttgccagctcaagagtcactgggatatgattcttgacattgatcgtcgcatagggggcgacaaacacagcgggggcaggattggtggctgcgtcggtcatggcgacctaggagggagaagaggcggcgcagcagggaggtggtggcgctgcggcacagcagggtggggatggtgcggcagcagggagggaagcgcaggatctagagaacaggattatcagtttaactcggaacttggcccaagatgtgaatatattctaaattatttacacataactgttgttctcttataaagattgtagctatgcctttctggataaattggacaactatgatattgatatgatcaaaactatttccattgcatgtaacttgtttggtgaattgatttacagtttcactttgacatagatacaaaggacacctatttcttagatagtttgatataatcttctttcataaaatgacactaaacaattgtattatatttatatgcatgagtcactgggtcccctctttttgcatgcaggaaagaggtgagaacattccagcagaagaatcttttgatgtagcaagaaggattaaagaaatgtactgctatacttcttcggacattgtgaaggtatttaaatgtcttgttatgttcgctggtggacatatgtattttgctttagaagaacattttttaagaaattcagaagaatgtgggtggaattggttctcttttgcacttcatggcaatgcattttgtttaaagtattgtatatcagccacctagttgatccattgaaaaatttacacctaatactatattgattgagatttgattatttaaaacattgtttgtgaaagaaaacctgctttttccaaataatgccatctattttttgtttcatattttttccactggtgaatgtttttctttaagggctactttaaatcccctctgggattcccgaggattgaggaaaaaattaagctaatttccccctcaattcctggaaatcccggaaagggtttaagtttccaaactagccctaagtattccgttccactccttcgagtttctagccatggagtttttttatagaagaaatggtccttccaaaaggacatttagtcataatccaccttagggcttttcgttttgctctcaatctatggattggggtggattgagtgggtttaaattctaaataagtcgaaatctttcataatttttttcaatctcattcaatccacatgggataagaataaccgaacatggccttactgttgctttttcaggaattcaataaacatgacaaggagccatcaaagtacattaaacactggacgggcaccaaaccgaagactggtgcaaaatacacatgtgacattggatatgagcgattcctagggcctgaggtatttggttttactaaacagagcatacagatatgtagtaacttctatttcaccattcgtgtcagacttgcagtaattggttgtagcttgtaggtagacaatgacatgcagaactactcccttttgttaatctgagttcactttacttcacttgtacctgagttaagtacttaagttggcttcgtagaatacctagtttgacacttttgagttcaaacctttatgattatgatgaatgtgactgcaatgctaacttttcttcaagtacatttttgctatacatgttaattttagcattatattttaattcaaccttcttatattagtgtcaaatctgcgcagatcttcttcaacccagagatatataacaacgacttcaccactcctttgcaagttgttattgacaagtgcatccaatcatctccaatcgacacaaggagggctctttataaggttcttatgatccgagtatcattatttattctaaggcattacatcgagtctgaaggatttccaatggcacagaatattgtcctgtctggaggctcgactatgttcaaagatttccataggaggttacagcgggacctaaagaagatagtggatgcacgggtccgtgcatctaatagccggcttattagtggggatgctaaggtacggacttcctgatttgctctccatgtcttcctgacagcaaaagaaaagggacaaccggctggaatcgttgcggctttgccagttttttagtcacacctaaatcatattggttttcaggcccagcctatagaagtgaacgtggtcagtcatccgatccagagatatgcggtatggtttggtggctctgtgcttgcttcaaccgccgaattctacgaggtataccagctctcagtttatttgtgtacatacatatatagcattacaaaatttcttggaaagaaccagaacacctgaaatttctgaatgtgaacttgtctgcttggacaagttattacactaccttggtgaagtatgtgtgttgcaacttattatgggagttctttcctgtgcctaggcttgccacacaaaggcagagtacgaggagtacggtgccagcatctgccgaacgaatcctgtcttcaaagggatgtactgactcagagcggttccctgtggctgacgtcgtggatgatatccactcaaagcttaaatggggagaagtgacagtggtcgtggagacaggactgtcgagagggatcctgatcgtggggaagcatagccgtacgagctgtacaaaagagaagcgcaaatagataggtttatgtttcaccatacaatttagatgctggtaggcctgacaggatgggtttgccacccctgctgaattgggtggcattgtaatttgtagcgtcaacacttctggcggtgcgagattgctccttgtatacatgttgattcggcagcgatgttttctctct

SEQ ID NO: 138 - DNA, 2454 bp, Zea mays
  source 1..2454: mol_type = genomic DNA
tgatgacgtagcgtcggggctggccgtccccgtccgcccgcgagtgggaggccaccgtttcctctcgcaccgggtcgcgtggagggagggcatggggccatggttcccagcgcggggcgccgagcgcgctcctccgctcgcgcagcgccagcgccacccccgcgccgggctttatataccaccctctcccaaccctacagaatcatcgcctccaccgttctctcttcctctgctcttctctgcctgcctgagctcaccgcacctcgcctcctcaccgcgtttcctccgttaatccggtaaccgtctctcaccatctctgcagtcaccctagagtccctctctgcctgcccctgccagcgcgggggcgcggtgtggctctcccagatccgcctggcattgctcgctcggggtcgtgccaagccgatccgatctcgcgcttgcgcgctcctgccgcggatccggctggatctcgctggaattggggcgcgcgtttatttgaaatgcagcagatccgcgtgcttgcgcgcgtgatctggcgtcgtcgcgggcctttcgttaacgaaatggcccgatctgtggtttggtggtcaatgccatgtttttttttattattactgtcttatgctgggagaaaaatagaaacagagaatagcttcaattgatgccttttagaacggattctatagagcaactcatggatactttctgcttgttttaacaaaatgtggcatcgggcgagctctggtgtaggtagaaaatggccgatgccgaggatatccagcccctcgtctgcgacaacggaactggcatggtcaaggtaagccaccggtttggtcacatctgttcttgagaatgcaaggttctcggtggctgctggggccctaacaacaacaccaacctcggcaggctgggttcgctggcgacgacgccccgagggccgtcttccccagcatcgtggggcgcccgcgccacactggtgtcatggtcgggatggggcagaaggacgcctacgtcggtgacgaggcgcagtccaagaggggtatcctgaccctcaagtaccccatcgagcacgggatcgtcagcaactgggacgacatggagaagatctggcatcacaccttctacaacgagctccgcgtggctcccgaggagcaccccgtcctcctcaccgaggcgcccctgaaccccaaggctaacagggagaagatgacccagatcatgttcgagaccttcaacaccccggctatgtacgtcgccatccaggccgtgctctctctgtatgccagtggccgtaccacaggtgagctgattccgttctctgcttaacaatttccaaatccgatttgctcctgcagtccgttatctctaatatctgtggcttcccctctctcaggtatcgtgctcgactcgggagatggtgtgagccacaccgtccccatctacgagggatacgccctcccccacgccatccttcgtcttgacctggccggtcgcgacctcaccgactacctgatgaagatcctgactgagcgcggctactccttcaccaccaccgctgagcgggaaatcgtgagggacatgaaggagaagctcgcctacatcgccctggactacgaccaggagatggagaccgccaagaccagctcttccgtggagaagagctacgagctccccgacggacaggtgatcaccatcggcgccgagcgcttccgctgccccgaggtcctcttccagccatccttcatcgggatggaagctgccggcatccacgagaccacctacaactccatcatgaagtgcgacgtggatattaggaaggatctgtacggcaacatcgtcctctccggtggcaccaccatgttccctgggatcgctgacaggatgagcaaggagatcactgccttggctcccagcagcatgaagatcaaggtggtcgctcctccagagaggaagtacagtgtctggatcggaggatccatcctggcatccctcagcaccttccagcaggtaaaacaaacaaacaaatttcgcattcgcatttcctcaatcaaggtctgctcacgattttgcttgcgactgcagatgtggatcgccaaggccgagtacgacgagtccggcccatccatcgtccacaggaaatgcttctaattctttgggcccgagaaatgcaagccgtgggggagccgttaccgccgccagcctctcctgcccccgttttcgttgccgtttcttcattagcgcgaacaaagttttgtgccggtctatcggccgccgctttcctcccctattcatcaagactgcaataactgtcgctacctatgcttctcacttgtgattttttggacacaatatgttaaggtccattcaattctaatgagacgcctgatgaggctacttcggattgtcattggttattgatgtcttatgaatgaataatataatttttttttgtca

SEQ ID NO: 139 - DNA, 2484 bp, Zea mays
  source 1..2484: mol_type = genomic DNA
tcattcggcctatcacaaccacttactctcgtgcgctctccgtgggagcgaggactcgcggccggcggcagcggcaggttctcctagatctccgggtaagcggtgaaagaagaggaggtgttggaggaattagttccgaatctttctccattacgattttcgtggcgtcgaggttagtctgaagcacgcagttcaacccattcttgcgcacagtagatcagatccgatttgttactgcggcattccgattgctgagctctggttgccgattagttatcaacataagccgcggccaagcagttcttacggggtcacaagaagaagatgaacagtttgtccatcttgcctcgcaaggataaccgcccgctagtgcgtttgtatttgtttgatttctgaaatattcgatttggagtgtcattaactgccctcgtaacgtgttttgactgcagaaactgtgcctgttctgtagatttagatgaatcacagtgttgagacaagattcatctgaatccttttgttaaattagaaaatagagatgatccaaggtcctgtctcagtggatagtggtgtagtgtgtttttgccctgtttcctttgctgaaaatgcagctaataccaaacttgctgtttcctattgagatagatattctgttacttatcctttgtctcctcgtgtttttgttccagcatcatcagtaacaaatggctgacggtgaggacattcagccccttgtttgtgacaatggaactggcatggtcaaggtttgtagttcttgttcatgctggtacttcatattctgcaacctttttctgctaatttaatcacacgttttcttacaaactattggcaggctggttttgctggtgacgatgcgccaagggctgttttcccaagcattgtcggacgcccccgtcacactggtgtgatggttggcatggggcagaaggatgcgtatgttggtgacgaggcccagtccaagaggggtatcctgactttgaagtaccccatcgaacatggtattgttagcaattgggatgacatggagaagatctggcaccacaccttctataatgaactccgtgtggcgcctgaagagcaccctgtgctgctgacggaagccccactcaaccccaaagctaacagggagaagatgacccaaatcatgtttgagaccttcaatgttcctgccatgtatgtcgccatccaggctgtgctttccctgtacgccagtgggcgtacaactggtaatgattctttaacatggtgaccaaatttcattaggacttcccaaatttttccatctcaattatggattgctgttccttcaggtattgtgttggactctggtgatggtgtcagccacaccgtgccaatctacgaaggttatgcccttcctcatgccatcctgcgtcttgaccttgctgggcgtgacctgactgacagcctgatgaagatcctcaccgagagaggttactccttcaccaccacggccgaacgggaaatcgtacgggacatcaaggaaaagcttgcatacgtggctcttgactatgatcaggagctggagaacgccaagagcagctcatctgtggagaagagctacgagctgcctgatggccaggtgatcaccattggggcggagaggttccgatgccccgaggtcctcttccagccttccttcattggtatggaagctcctggcatccatgagaccacctacaactccatcatgaaatgcgacgtggatatcaggaaggacttgtatggtaacattgttctcagtggtggcacaaccatgttccctggcatcgctgaccgtatgagcaaggagatcaccgcccttgccccgagcagcatgaaaatcaaggtggtggctccacccgagaggaaatacagtgtctggataggagggtccatccttgcctccctgagcaccttccaacaggttaaaaccttataacacttgttattttccagttgctatggcaaatattccaacctttcggtagttccagtaagctcttggttctaaaaacatgctctcgtatttatatgctacagatgtggatctcaaaggctgagtacgatgagtcaggaccagcgattgttcaccggaagtgcttctaagctcaagggcccccttcgtccccattctatgtattcctttccttgagtgcttttcttataagctactatgtttgagattgccggcctttgagcaggcaatgttgttggatctgtatcttgtggatcactacaatgcatgcgttgctccatcttcttttcatgccaagtttgctgtcatacttgctagtggggaaaacaacaatgacaacagtggtgagaacagcaaccacaaaaaaagagaggatggaaattattgaagttcctaggatcgtattgtaactgtacttgtgcgagtaacattattggttctctttgtatatccatctctgagacatgcaattctttttgattggtttgcta

SEQ ID NO: 140 - DNA, 4364 bp, Zea mays
  source 1..4364: mol_type = genomic DNA
gacaggtatctagcaggtcacttaagaaggccattggattcaaaactcatgtacgctactgtgacacattgatggtcctgaagttgtggataatgtcaaaggttccctttagatcaaggtaacttctaggtccctttgtctagattatacacgtatactgtgtgtttgagaaatatatttgagccataaatttgttatgcaaaactgaagcataatcgcttagttgtcatcctatctctactcctccttatgtttgtatcgtatgcgtccacattcgaggatggtgcacggttctaatgccttgtctgttctaatgccttgtctattctaatactttgtctgttctaatactttgtctgttctgatgccttgcctgttgggagtgctctatctaatgccttgcttgttgtccgttctgatgcctgttgtctgttctaatgcctgttctctgtgaactgtctttgtctgtttcggtggatgctgccggcgtgaagcactggccaccgggtgctgcacgtcaacggccaacaggggcaccgtgcaggtgggcagaagcagccagcgacaacagtagggcacaggtaaaatgatcccccactttagaaattgcaatccctattttgatcctcggatgtgcgccatgcacccctggtccctggatgtattttcaatgaattggctatcctaggctacaagcagaaatggtaagttgaactgagttagaagataactgattattcagcgtggataaatattgtttctaaccaagctttctatcctatatttgcatgttcttcaaagggatgtatatggaccttccaaatacactagacttttgcaagcaaccaaagatactctcagagaagaaggtttgccttgccttgaatacttcttgacttatgtcatattgagcatttgagctattgagaaacatactaatacagacattgttgagagtatctttggttgcctctatgtaataggataaactaagcagcattgtacaagatactggtacttttgcacttgcactgtctcttcttgctaggtagagtcctaccccatagtctggaactagaagaattctgattttccttttaggaatcaatgtctatttgagctttgtttggtcagaaatgcattgtagaaaaatttagatggtgagatttttttctttgttctcatttttgatcattgtagtataattttttcagaggttgttctcatttatctataactttttatttttttacgaaaagtcggtgcatgctgattatgcaccaagaaacatcctttcgcagccccattaatcatctccatagcagccatcgacaaaaaacagtcctgaaaatttagaaccttccttcagttaagaaatatgtctgttactgaaatggagaagggttgtacacatagttcaatgaatcaaaaggaaaattgacctgtagagtaatatggttaaataaatgtttgggcaaatccataaacccttcagaagcttgtaaaatcgataagtagctccacataggctgctagctgtttgttgtttaaataaataaaacagtgtaaatatgtaatttaatcgtttggcctctgaatgtaggctgtagtttagttgtagttagaccataaccttgccaatgcaatttcacatagaaaattagaatctcctgttgtgcctcctcttttaccactttgtagttctttttgcttggttttgtgttagttgtgtgtttcttttccagcttgctgagattgacaatcatggaaaactgacatctaatgagatcaacataaattttctgtcagttttttaattgtgttgtttgtatgctttctttccagcttgctaagattgtcaatcaaggaaaattggtgtctcatgagatcatcataaatctcctgtcaagacgcctggaagagggagaagaaaagggtgaattggggttcatccttgatggctttcctcgaaccatgagacaagcgataagctaattatttgacctgaccataagtatgcaaaaacaaacacttgcctttgatcaggaagcatttttcacttgctttcgttaacgaaatggcctgatctgtggtttggtggtcaatgccatgtttatttattactgtcttatgctgggagcaaaatagaaacagagaatagcttcaattgatgccttttagaacggattctgtagagcaactcatggatactttctgcttgttttaacaaacgcggcatcgggcgagctctggtgtaggtagaaaatggccgatgtcgaggatatccagccccttgtctgcgacaatggaactgcatggtcaaggtaagccaccggtttggtcacatctgttcttgagaatgcaaggttctcggtggctgctggggccctaacaacagcaccaacctcggcaggctgggttcgctggcgacgacgccccgagggtcgtcttccccagcatcgtggggcgcccgcgccacactggtgtcatggtcgggatggggcagaaggacgcctacgtcggtgacgaggcgcagtccaagaggggtatcttgacccttaagtaccccatcgagcacgggatcgccagcaactgggacgacatggagaagatctggcatcacaccttctacaacgagctccgcgtggctcccgaggagcaccccgtcctcctcaccgaggcgcccctgaaccccaaggctaagagggagaagatgacccagatcatgtttgagaccttcaacacccccgctatgtacgtcgccatccaggtcgtgctctctctgtatgccagtggtcgtaccacaggtgagctgattccgttctctgcttaacaatttccaaatccaattttctcctgcagtccgtaatctctaaaatctgtggcctctctcaggtatcgtgctcgactcgggagatggtgtgagccacaccgtccccatctacgagggatacaccctcccccacgccatccttcatcttgacctggccggtcgcgacctcaccgactgctcatttgcgctagactgtgtttgttcaaaagatattattcaaaatttaactgaaagattttatttgttgcacaattattgtattgctttgtttgttgaatattatttgcttggtgatgggctgctgttgctgctagcaggattgagaacggatgggctgcaatctattgttggtgcctggtatcagagggtgcacctgttcacaatcttgaggtgagaataccgaaactgtctaagagacttctcgaggtgagaataccgaaactctcttaattagaggtgtgtagtaattacacaataacattatcaatcttaattatttatctgattcctagccattgctgccgcctcagcccgcgctcgaccaccgccgccgctacttcaagcagttaacttagctgtggggtaaaatgattggttagcgatcttttctacttttatatactgtctgcatagtacacagtaggtacatataacttatctttatctttctcctcttttcttttgacatgatcaaataagcttctgttataggccattaagcattcaagtctatagtatccaaaatgcaacatatgttatttgaatttaactgaaaaagcacatatgttatttgaattcagaatcgtaccagtttaaacattttctcagttataggccattaagcattcaagtctatagtatccaaaatgcaaccagaccatacatttctgatgtgaaccagtgctggttgtggttggagaagcttgtgccacaaaccaaacatgttcatatcgtggccgtttcggccatatgttgggccatctagaaatcaaggaatagaatgtgctttgagaatattctaattaaatcacctaatgaaattatctgccatgcgagtgctctgatgatttcatcggtaggtttgagcaaaagggagctgcagcctgcagggcttgattcaagaaggtgcaaagctgctggtctgggcagcgagtgtaacgttggatgctcgtgttgtcgatcaagtggaagaggataatgatgatacagagagttaaaagtttggtatagtgatcaactttccggtggaagcccgacgaggattgtctacttctggatcttggccgtgtagctttgttctacttctcttgtgatgttcttgttcgagtataaggtctacaatggcataatgcttgtaccatctttttctgtggtaacttatttttttctcatgcagtgcatgtgacttgaaactttgttaagacatagtttgtgaaagggaaaatgatccaatattttctatagtcgattttggtatttgacgtccatcacaaacgattatgaacagaagctatgtacttgtctgcatttt

SEQ ID NO: 141 - DNA, 3271 bp, Zea mays
  source 1..3271: mol_type = genomic DNA
tgaatcaaaaggaaaactggtgtctgatgagatcatcataaatctgctgtcaagacgcctggaagagggagaagaaaagggtgaattggggttcatccttgatggctttcctcgaaccatgagacaagcggtaagctaattatttgacctgaccataagtatgcaaaaacaaatacttgcctttgatcaggaagcatttttcacttgctttcgttaacgaaatggcccgatctgtggtttggtggtcaatgccatgtttttttattattgtcttatgctgggagcaaaatagaaacagagaatagcttcaattgatgccttttagaacagattctgtagagcaactcatggatactttctgcttgttttaacaaacgcgacatcgggcgagctctgatgtaggtagaaaatggccgatgccgaggatatccagcccctcgtctgcgacaacggaactggcatggtcaaggtgagccaccggtttggtcacatctgttctcggtggctgctggggccctaacaacagcaccaacctcggcaggctgggttcgctggcgacgacgccccgagggccgtcttccccagcatcgtggggcgcccgcgccacactggtgtcatggtcgggatggggcagaaggacgcctacgtcggtgacgaggcgcagtccaagaggggtatcctgaccctcaagtaccccatcgagcacgggatcgtcagcaactgggacgacatggagaagatctggcatcacaccttctacaacgagctccgcgtggctcccgaggagcaccccgtcctcctcaccgaggcgcccctgaaccccaaggctaacagggagaagatgacccagatcatgttcgagaccttcaacacccccgctatgtacgtcgccatccagaccgtgctctctctgtatgccagtggccgtaccacaggtgagctgattccgttctctgcttaacaatttccaaatccgattttctcctgcagtccgtaatctctaaaatctgtgccctctctcagattttagagattacctgtatcgcaattttagatattccgtggaaaagacggaaggcctgggtgtgttcagaacacatgtgctcacagggcttgcccgctgcatcttggttcagtgaacgagggtaggatccagtgcccttaccatggtaagtctcctactgtctgaattagttcagagattctcggggttactgtatcttgttttcagaagtgcgcctacttgtttgtttaccctgtctgaattaatagtgacaaataaatagtcatgcttataaagcacaacttttctctctctctctcttaaagttcgatgtattggttccagcacatttagttctacaacctcaaaattagctgaaagatgttctgataaaggaaggcatttgttgttgttgttttgacattcttattgctctcttgtgatgtcgtttatcacagaaaagcaaggatgatgcataatgaacgtctatgatttataatggtatgttcttcaggttgggagtactctactgatgggaaatgtgaaaaaatgccatcaacaaatatgctcaacgtgcacatccagtcattgccatgctttgagcaggaaggaatggtctggatttggcctagggatgacccaccaaaggctacaatcccttctcttctgcctccttcaggatttacatgctcactgttgatgcagggggtgcatggcctagggggaggatggcgactaggttcatcgatggcggcaagcagctcgtgttcgaccacgcgacacagttcttcactgcgagcatccgcaccgctgcaggtgctgcatatcatcggcagagaggatcgagttcagatcgatgatgcaaggcggctgcatcgtcgagctgtaacacctgcagcggtgcggatcaatgaggggatttttttgtacagggccagggtattaccccatgacctggtgaaagggaccactgagccgtaatgcaaccattgtaactctgaagataatcagtcatctaacatttgattattcaactagatagatgatgcctccttatgggacaccaccaccatatgcagcaatgtatgcacaaggtacaccataacagcaggcaccaatgccaccggtaatgtacctcattttacatgagagcatgttcttattgtgctaatgcatggttgatatagtaatgaactaaaatgtccttgtttttttgtcagggttcacacccatacagttcttatcctatgcagtcaccaaacggacagttcaaactccagtaagttaatgggcgccttttatttgatctattgattgttgcagaatggatgcataatttcactgtttcctttctaaagcttttcatctcaactgttatatgtcatttatatttatttgtttgagtcctgtttatgccatctgtctcctcaaagcagataagaatctcttggctgctcacctgtcgcatcttccccgattcaaaatcgtcctggtcgcatcttccccgattcaaaatcgcccagttgagttttccaatcctatatttttttctcgaaagttttccaatcctatattcagtttgcagtaacacgatttttgcatttagccattttttattttgttgtatactttcgtactgcttcgtagacagcaagcaatgattattgaaactaatagtaagaagaatgccccatctattgactccaaagcccacgttcttttgtaattctatagtgaaactttgtcaattattagggtcctagattcagtgaccgtttatccaccccatgtcaatgtcttgcaactatatgttcatcttaaatgcagttctttttttttcaattggtgaataaataaaatatatagccttgtaaggctgacctggtttcactacgttctggtttcccatgtttacatctagcacctttgaactgaacatgtgtcatttaagatacgagagttgagtagtattgtttgatgtaaatctctaccactataaaacacctttctaccgttggcatgcgttaacacagtgataatttgcaaatgcaaattagcactttgaactgcaaagaggtctactgttcatattatttcctatgaggtagtatgtctatgcgttaacacagtgataatttggtagtatgtcttttgtctgagcaacttctgttgtggttattgtttataataatggcctacatgtagtattcattttctctgtagtataataagcccattaaaacaattgaatgccattgtccgtgcatc

SEQ ID NO: 142 - DNA, 2958 bp, Zea mays
  source 1..2958: mol_type = genomic DNA
acatactccttaattcaaaattttctacttcgattttgaaagctgagctttttttcttctaaaatctaagaaaatcgcgagaagtcaaggagaccgtgcctacgcttttcttctccctccattcattcacacaccacacctcccgaactccgaactacaagtttcgcttctcgtcgcgacgactgggcgagaccgccgccgccgccgccgcctgaggtattgccaccccttctttcccctcccttcctttcatgctgtgcgaagctgagcatcggaaccctgacctaaagctatttagcggcgtcgctcctctgcggggcgacacgtgcggaaccagcgccgccgccgcaagagttggcccgcctcgttctttacaatatcgccttcgcctgagcacgcggccggaggcccgcgtcggtgcgaggatggcggcggcgaggtctctcagcttttctcgcccgttctcttaagcgtacttgcctcgtgcctgcgccagctaggacggttccctggagaagctgacatcgtcgtcgctgtcgctggcggggaggttgtctggccggacgggggccccgcggcggcgccggcctcgatctggtgcgctatggccggatccgtggtgtgttgtggtgtgggtggagattcatttgtgggggcacggatccgccgcgctccatgagtccggatctgcactccttcgagagttttttgcagaaaaatattgggtgtacatccatgtcccttttactggatccgaaccctgagtgtgatgtcagaaactgttgtctttgtgttgtctttgtgtgaacttctctgtataaattgaatttactgctttcagttagcatgtgtattcaaatccagtcttccttttcattcacatgttgaactaaaacactttcatcactggttggtatttgattctatccatatgccacattgccgcttgctgcagttctttagaaatggctgatggtgaggacatccagcctcttgtctgcgacaatggcactggaatggtcaaggtcagccccccctcccccctgacccccaacttgatttgtacaaccttatttccaagtatgccactaattatgtgtaccttctactcttctaggctggttttgctggcgacgatgcaccaagggctgttttccctagtattgttggccgtcctcgccacactggtgttatggtagggatgggacagaaggatgcgtatgttggcgacgaggcacagtccaagagaggtattctcacgctcaagtatccgatcgagcatggtattgtgagcaactgggatgacatggagaaaatctggcatcacactttctacaacgagcttcgtgttgccccagaggagcaccctgtgttgctcactgaggctcctttgaacccaaaggccaacagggagaagatgacccagattatgttcgagactttcaatgttcctgccatgtacgttgcaattcaagcagtgctgtcactctatgccagtggacgtactactggtatgacctgcttcttcctttactttggtgttgattcagtatttcagttctctgaccagtcctagtaatatctctatggtctcaatatgctgttattaagtgtttatctgaggttattgttaaggtcatatcaagccaccaagtatctttatcttctattcttgctcatgagattgcataactcagatacactgcatatgtggttaccacctcagtctgtgctgagattgcatagttcagtcaaaaataagcataatacatcaataataaacaatggaagttaaacataattgtttacatggtgtggctgatgtttccgcttttttattttctcaatctacaggtattgttctcgactctggtgatggtgtgagtcacactgtgcccatttatgaaggatatgcccttccccatgccattcttcgtctggatcttgctggtcgggacctcacagactccctcatgaaaattctcactgagaggggttattccttcacaacctctgccgagcgagaaattgtgagggacatcaaggagaagcttgcatatatagctcttgactatgagcaagagttggagactgccaagaacagctcctcagttgaaaagagctatgagctgcctgatggccaagtaatcaccatcggcgcagagagattcaggtgccccgaggtcctcttccagccatccatgattggtatggaggctgctggaatccatgagacaacatacaattcaatcatgaagtgtgatgtggatatcaggaaggacctctacggcaacattgtgctcagtggaggttcgactatgttccccggtatcgctgatcggatgagcaaggagatcacttcccttgcaccaagcagcatgaagatcaaggtcgtcgcgccacctgagaggaagtacagtgtctggataggagggtcgatcctagcctcgctcagcactttccaacaggtatgggttgtttatattgctttcagctgctgcacttgatttctttttaactcccaatatggctgaaacaaagtcacgtctgaattctgttatgcgatgccattgatttaccagatgtggatatcaaaggaggagtacgatgagtctggcccggcaattgttcacaggaagtgcttctaggtttctgccaagttcgtcaagtgcttttagggttcgccatgttcatcatcgctacctagtcttaagttatgcccccttcatttgctgagatatgtgtggcagatttgcatcgttttggtatttcgtggctccatgtgtgagcatgctgtgtcctataacctggtttatgagatgagttgttaaacttgcttggcttgattggttttacctgtaagagctgatagttatataaattgcttgtacttgtttgcatccagaacatccgtgcaagtatgaatggccctgtacatgggctgggttttctggctta

SEQ ID NO: 143 - DNA, 2717 bp, Zea mays
  source 1..2717: mol_type = genomic DNA
acaacgattagagccactcgggtccatggacaccgatattaacccggcgagtacgctgaccacgcccgaacacccgaacagctgctgaccagcatcttgtggttgtggttcctcgtgtgtgacacctgtggtaatacggttgtgctgacaccacccattttgcaatcacaattaactaattcagacctgggtagacactattccctgtttcattttctgtcttttctttttttagttactactattaattttctctcaccaggacgagcctataaaaaccggcgaaatccttggctctcctctcctcacttggccaccataaccacaacctcttctcccctgtttcctctcgtgcgttctccgcaggagcgaggagggctcgcggcagcggcagggtctccgggtacgtcgtgaatgagaagagaaagggttggaggaaatatttccgaatctgtttccattacgattttggtggcgtagaatttggtttcaaacgcgcagttatgcgcacactagatcagatccgacttgttctgcggcattccgattgcttggcccttttttgccgattagttatctacgtaaaccatggtcggcataatgcgtttttgtttattgccttggtctctgaataaaggtagttattatttggttcttgggtaatggagtgccattgaatggtccctgcatagcgtggtattggttctgtagatttagatgaatcacagtgtcaagagagacaagattcacctgaatcctctgctaaatctgaaaaatagagatgatccaaggtcctctgctgaaaatgcagttttcttgttaataccaagcattctgccgtttcctattgagatagatattctgttactgatttttaccctagcttggtctcctctcctcctagtgtttttgttccagaatctgtagcaaatggctgacggcgaggacatccagccccttgtttgtgacaatggaactggcatggtcaaggtttgtagttcttgttcacgctgcttcatgttcagtaacattgttctgttaatttaatcacatcacaaactactggcaggctggttttgctggtgacgatgcgccaagggctgttttcccaagcattgttggacgcccacgtcacactggcgtgatggttggcatggggcagaaggatgcgtatgttggcgatgaggctcagtccaagaggggtatcctgactttgaagtacccgatcgaacatggcattgtcaacaactgggatgatatggagaagatctggcaccacaccttctataacgaactccgtgttgcgcctgaagagcaccctgtgctgctgaccgaagccccactcaacccaaaggctaacagggagaagatgacccaaatcatgtttgagactttcaatgttcctgccatgtatgtcgccatccaggctgtgctttccctgtacgccagtggacgtacaactggtaatgactcgttcacatggcgaccaaatttcattaggacttacaaattttcccatcttaattatgggttgctgttcatcattcaggtattgtattggactctggtgatggtgtcagccacacagtgccaatctatgaaggttatgcccttcctcatgccatcctgcgccttgaccttgctgggcgtgacctgactgacagcctgatgaagatcctcactgagagaggttactccttcaccacctctgctgaacgcgaaattgtaagagacatcaaggaaaagcttgcatatgtggctcttgaatacgaccaggagctcgagaatgccaagagcagctcatctgtggagaagagctacgagctgcctgatggtcaggtgatcaccattggggcagagaggttcagatgccctgaggtcctcttccagccttccttcattggtatggaagctcctggcatccatgagaccacctacaactccatcatgaagtgcgatgtcgacatcaggaaggacttgtatggtaacattgtgctcagtggtggcacgaccatgttccctggtattgcggaccgtatgagcaaggagatcactgcccttgcgccgagcagcatgaaaatcaaggtggtggcaccgcctgagaggaaatacagtgtctggataggaggatccatccttgcctccctgagcaccttccaacaggttaaaaacttacacctttttttttatttgcagctgcaatggcaaatattgcaacctttcagtagttccagtatcttcttactaaaaacatgctctggtatttatgctacagatgtggatctcaaaggctgagtatgacgagtcaggacctgggattgttcatcggaagtgcttctaagctctgggtcccccttcggctccattttatttattccttgagtgtttttcatataagctactatgtttgggattgcatgcctttgagcaggcaatgttgttgaatttatattttgggatttatattttgtggctcactacaatgcatacattgctccagctcctttccatgccaaatttgttgctagtggtgaaaacatcaaccacaaaaaagagaggatggaaattaataaagtacctaggatcatattataactgtacttgtcgagtaacactattggttctctttgtacatccatctctgagacatgcaattcatttgcgacgtgtttggtttgatgtagtgtaagggtataggacagttatctgataacgtt

SEQ ID NO: 144 - DNA, 3189 bp, Zea mays
  source 1..3189: mol_type = genomic DNA
ggaaggaagagccacagatatgcatggttggagagagcggggaagtttaatttggagggggtacagtggatttacagtggatttggagagcgctgcggaggaggagtggaaggcctgtgccgcccacgcggccgccgcgcccctccgtgcggctagcatcccctcccctctcggctgcttgctgcggcggcgcgtcggcccacgggtgaagaggggagaggcgagagtgaggagacgacgacacacctgtctctgtaatgcagatcgggttgacggatccaacggctggaggaaagtgtttatagaaaagcccctcactgtccattattttgtgaagaagccaaacccgtcgaattgcaagccagcacagaacagatcccttctcaatcgcatctgggtctggcagtcttctcgcggttgcaggccacaaacaactgctcctcctgcattccccctttccccttccgtccgctgcattcctgctctcttgctctcctcgctctcagaccacagttgccgccgccgccgccctaagccagggtgctgaggctttcgttggcctcttcgccggcagcgagcacccaccaggtactcccacctcttctcttcccttcccttcatgctgtgcgaagctgcgaaccgtcgctcctctgcggggcgacacgggcggaacccgcgccgccgctgcaagagttcgctcgctgccgcctgagcacgcggccggaggcccgcgccggtgcgagggtggcggcagcgaggcctttgtactctcctcgcgagttccctccccaagcgtgcttgcctcctcctgcctgcgccagctagggctgggctcgatctggtgcgctatggccggatccgtggcgtggcgtgggtggagatccacttgcaggggcacggatccgcattccatgagtccggatctgcaacagcggtggcatcagcgcggcggggggtgcgattttttttcagatgcatataagtccctttactggatccgccccgcccctgaatgcgatgttgcaaatttcagattcaatataacgtcagaaaccgttgtcttccagttagcatgcgtctcaaatccagtgctccttttcaatcacatattgaactaaaacactttcatcattgactcatttgattctatccatatgcgccacctgcagcagttctgtagaaatggctgatggtgaggacatccagcctcttgtctgcgacaatggcaccggaatggtcaaggtcagtgcttttccccttaatttgtacagccatagtctcccccacccaaatatgccactaattttgtgtatctatcttctaggctggttttgccggcgatgatgcaccaagggctgtattccctagcatcgttgggcgtcctcgtcacaccggtgtcatggtagggatggggcagaaggatgcatatgttggtgatgaggcacagtccaagagaggtattctcacgctcaagtacccgattgagcacggtattgtaagcaactgggatgacatggagaaaatctggcatcacactttctacaatgagctccgtgttgccccggaggagcaccctgtgttgcttactgaggctcctttgaacccaaaggccaacagggagaagatgacccagattatgttcgagactttcaatgttcctgccatgtacgttgcaattcaagcagtcctgtcactctatgctagtggccgtactactggtatgacctgctccttccttttagttcagtgttgatccagttttctagtaatctctctctttgtttccattaggctcttatcaacccaccaagtatctttatcttctattcttgctcatgagattgcataactcaaaatacactgcatatgtggttacctcagtctgcatggtgatatgaaattatgaattcagggaaaaaataagtatctcagctagtataccaagaataaataacggaagtcaaaattagttgtttacacggtgtgactgaagtttcctctttttttattctcaatctacaggtattgttctcgattctggtgatggtgtgagccatactgtgcccatttatgaaggatatgcccttcctcatgctattctacgtctggatcttgctggtcgggacctcaccgactcgctcatgaaaattctcactgagaggggttattccttcacaacctccgccgagcgagaaattgtaagggacatcaaggagaagcttgcgtatatagctcttgactacgagcaagagttggagactgccaagaacagctcctcagttgaaaagagctatgagctacctgatggccaagtaatcaccatcggtgcagagagattcaggtgccccgaggtcctcttccagccatccatgattggtatggaggctgctggaatccatgagacaacatacaattcaatcatgaagtgtgatgtggatatcaggaaggacctctacggcaacattgtgctcagtggaggttcgactatgttccccggtatcgctgatcgtatgagcaaggagatcacttcccttgcaccaagcagcatgaagatcaaggtcgtcgcaccacctgagaggaagtacagtgtctggataggagggtcgatcctagcctcgctcagcactttccaacaggtatgcggttgtttatatctactttcagctgctgcacttcatttgttttaactcagtaacatggttgaaatgataacacttccgaattctgttgtgatgtggcattgatgtaccagatgtggatatccaaggaggagtatgatgagtctggcccggcaatcgtccacaggaagtgcttctaggttccgcaagttcctcattgttatctagtctcaagttatgcccccgtcatttctcgagatatgtgtggcagatttgcctgcgacgtttattttcatcggacctgagtcttctcggggttagcagctacctttgaatgttgtggctccctgtgcgagcgtgctgtgtcgtatcacctggtttgtgagattagttgttgtcaaacttgcttggtttgattggttgtgcgtttaagagctgatagttatatacatatattgctttgctataccgccgctatatctatgtagcctttatgtatgtatctggattctgaaatgcaagaatgaacttcgagcagcctttgtgttgccgatattttgtggtgccgtta

SEQ ID NO: 145 - DNA, 3568 bp, Zea mays
  source 1..3568: mol_type = genomic DNA
accgttgctaccccagcacgctctcgccgtcgccacgccctatatctcgcgcgcctttcacgtcccactctttctccatccgcacgctcgcctccctgctagtgctacgcttcgtgccgccgccgcaacctattccttcccgttccaggtgagcgaatcgagagccccttgccgcacttccttaatgctgctgtttcttgttgctgccgaggatgtctagaggactggaggctgcgtgataggatgtactgggatctggggtctggggttcgctggtcgtataaggttctggttgactgttaaattctggatccgtagtaggagtaaggttcgccaaagttgctgaggttggtgacccgtgctccgtgggttgtggatgtttcgatcctgtgtttatgttaaggtggctagtagtgatacactagacctctttataatttttcggtattataatatggcaacaactaatattagcctgtggtaatggagtaatggacgcagacttcttcggtgcaagtgagctctacagggctctttgtgcttagaatttatacaaaggaaatttgtgatcttcatgtttagagtcgtttaatgaccgcggaactgcattggtcctcatttgaaacttccgaaactatggccttattttctttattggttttatagttccatccggctgtaaaaaaattggcgaattctgtgcttctgcagagcagtttaagtttatagacaaatgttgcttcaagatttcttaaatgttagaaatgttatatgactatgtccacaaatcatggagatggaattcttttcaccaaaagggaaaaggtcatgaagtttgtgtattggacattggcacgcatgtgctggattccttgaaccgtctactgtcagatgcatcaaatgccttctgatcagaaaatgctactcaggaaaacctgtagacatcaagtggcattagccgctgcagctgtgtagaaccatagaagtgcagctgagcagggacactgtttttagttgtgacttgtgaggaattcacaacattgttttcagtaattgaccatgtgtttgactaaatcttcaggaactggtgtcattccttgtgctattgcacaaagtgtttgcatgtattggaatttagatgctccagagccagaccaacctaactttttttgtatgtttacaactaatattaaactagttgtttaatatacatggaaaattttaaattaattatttagttgcacaaagggttttattcttgtaagattagcggtttgcccgtttctgataacccataatttgtttttccttgatttctcacaattaccatatcttatgttttggtttcgtgcttgataaatattagtactcaatgggaatatattagcatccttttctgagtcaatagataataatttgttaaggtgctactcatgtcttctgctgggagtaggcacatcagccttttctcccttactgaagtaattagcacatatttgtctacagtcttggtaaatgcttctcctgataaattgttttcattcatgcagattgcagatcatttaacataaatggctgacgcagaggacattcagcccctagtctgtgacaatggaactggaatggtcaaggtaactgtagtcgcttggcatcatattctctaatgattcctctttttccatacagcttttagattttcagtcaatgttaagcactttttccatctcttataggctggctttgctggagatgacgctccacgtgctgttttcccaagtatagttggtcgtccacgtcacactggtgtcatggttgggatgggacagaaggatgcttatgttggtgatgaagcccaatccaagaggggtattctgactttgaagtaccccatcgaacatggaattgtaagcaactgggatgacatggaaaagatctggcatcacaccttctacaatgagcttcgtgtcgcaccagaagagcacccagttcttcttacagaggcccctcttaacccgaaggctaacagggaaaagatgacacaaatcatgtttgaaaccttcagtgttcctgctatgtatgttgctattcaagctgtgctttccctatatgctagtggccgtaccactggtaagtgatcaaataatcatcattttatttgtgtgcattcatcttgttgctctggagtctggaatcttaatcatccagcagaactgaattgaccaatggtgaaatgtcatatttgttggtcaaaaatagctaaaactaaatctaattcactagtatcttctgcaaaagaacaccttgactttatcattgcttcataaatgacacgcggcagggcaaacccagtgccagaggctctcacctgagtgccttttggggaagggataaaccgaggcaagtcttccccgcaattgcggagaggctggttcgaacccacggcctgtgactcagtgagacagctctcactactgcaccagggctgcccttctttataaatgatacagggatatttttttgtttcatttagttggccaatgcacatttggattttgttttggttgacaggtatcgtcctggattctggagatggtgtcagtcacactgtcccaatctatgaaggctacgccctcccacatgccattcttcgtctcgatcttgctggcagggacctcactgattccctcatgaagatcctcaccgagaggggctactctttcacaaccactgccgagcgggaaattgtacgtgacatcaaggaaaagcttgcatatgtcgcgctagactatgaacaagaacttgagaccgccaagagcagctcatcagttgagaagagctacgagctgcctgatgggcaagtgatcaccataggcgcagagcgcttcagatgcccggaggtgctcttccagccatccatgatcggtatggaagctccaggaatccacgagacgacctacaactccatcatgaagtgcgacgtggacatcagaaaggacctgtacggcaacattgtcctcagcggtggatccaccatgttccctggcatcgctgaccgcatgagcaaggagatcaccgcgctcgcgccaagcagcatgaagatcaaggtcgtcgctccgccggagaggaagtacagtgtctggattggaggatcaatcctcgcatccctgagcacattccagcaggtaacaccaagtcttccgacggctgttctgtatccacaatctatgtttatttgtgaaaatgcacctcacggtagggttgcggagaaaaggtttatttgtgaagctactctgacattaagtccatcttttccctgtgcagatgtggatctcaagggctgagtatgaggagtctggtccagctattgtccacaggaagtgcttctagacgtcactcctcgtggaaatgcctttgtttcatgacatatctatgggtggtcgctctgctacagctcgcagttttttgtgtatgccacaagccgcatatatatatatccattctggtaacgttgtggagtcagccgagcactgtatgaagtatgtagtttggtttgatatatattgattgg

SEQ ID NO: 146 - DNA, 3020 bp, Zea mays
  source 1..3020: mol_type = genomic DNA
gccactctcacggttgccaccctagcacgcgctcgccgtcgccacgctctatatctcgcgcctctcgccttccactctttctatacccgcccgctcgcctccctggtacgcttcgtgccgccgccgcaacctcctcctccccgtcacaggtgagcgaatcgagggctcctcccgtacttctttagtgttgctgtttcttgttgctgccgaggatgtttagaggactggatactggaggctgggtgataggttgcagtcatgcagtggggttcgctggttctattaggtgttggatccgtagtaggagtaaggttcgccaaagttgctgagactttggtgacctgtggatgctttgatcctgtgtttatttcaaggtggctagtagtattgcactagatctcctctccttgtaaattttggatataataagcttctggtaatggacgtatagttcatctgtgcacgtgaacagtgcagagatccttgtgattagaatttagaaaggaacttttggatctagtcgtttaatgaccacgaaaatgtattggtcctgatttagaacttcctatactatggccttattgttcttattgtttttgtagttccatctggctataaatttttttggcaaattttggtccttttgcagagcaggttaggcttataaccaaatgctgactcaagatttcttaaatgtttgaaaatattatatgactcatgtccacaaatcctggagatggaattctttccacccaaaaggggaaggtcatgaggtttgtgcattggacattgatgcgtttgtgctcatgtgctggacttcttgagctgtctagtgtcagatgcatcgaatgccttctgataagaaaatgacatttcagatcgtcagttgtgaggaatcataactggctgcgataggaagtgctagctgcagcagcactactcagtaaaacctgtagaaattaagcagcatcagccgccacaactgttttcagttgtcaggaaatcacagtgttgtttttaataactggctatgtgtttgactaaatcttcagggactggtgtcattccttgtgctattgcacaaatcgtttgcatgtattggagctttggtgtcagtcttagtaaatgttgctcatggtaactttttttattcatgcagattgcagatcatttaacataaatggctgactcagaggacattcagcccctagtctgtgacaatggaactggaatggtcaaggtaattgtggccacttggcgtcatattctctgcagattcctttttttcaggcagcttttataatttaattttcagtcgatgttcattattttccccccatctcttataggctggctttgctggagatgatgctccccgtgctgttttcccaagtatagttggtcgtccacgccacactggtgtcatggttgggatgggacagaaggatgcttatgttggtgatgaggcccaatccaagaggggtatcctgactttgaagtatcccatcgagcatggaatcgtaagcaactgggatgacatggaaaagatctggcatcacaccttctataatgagcttcgtgtagcaccagaagagcacccagttcttcttacagaggctcctcttaaccctaaggctaacagggaaaagatgacacaaatcatgtttgaaactttcagtgttcctgctatgtatgttgctattcaagctgtcctttccctttatgctagtggccgtaccactggtaagtgatcaaataatcagcattttattcatgtacattctttttttttgctgctctggaatcttaatctagtataaactagttgaccaaaggtgaaatatgatattaaaactaaatctgattcaatagaatcttcttcaaaagaacacctgaaccgttttttataattgctgcataaatgatatggggatagaaatggatagaaatattttcctttttatttcactcagttgctcaatgcacattgggattttgttttggttgacaggtattgtcctggattctggagacggtgtcagccacactgtcccaatctatgaaggctatgccctcccgcatgccattcttcgtctcgatcttgctggtagggacctcactgattccctcatgaagatcctgactgagaggggttactctttcacaaccactgctgagcgggaaattgtccgtgacatcaaggaaaagcttgcatatgtcgcgctcgactacgaacaagaactcgagaccgccaagagcagctcatcagttgagaagagctatgaactgcctgatggacaagtgatcacaataggcgcagagcgcttcagatgcccggaggttctcttccagccatccttcattggtatggaagctccaggaatccacgagacgacctacaactccatcatgaagtgtgacgttgatatcaggaaggacctgtatggcaacattgtcctcagtggtggatccaccatgttccctggcatcgccgaccgcatgagcaaggagatcactgcgctcgcgccaagcagcatgaagatcaaggtcgtcgctccaccagagaggaagtacagtgtctggatcggaggatcaatccttgcatccctgagcacatttcagcaggtaacaccaagttttccggcggctattctgtatctactatctgagtctattttgtgaagttctgacataagttcttgttttccctgtgcagatgtggatctcaagggctgagtatgaggagtctggtccagctattgtccacaggaagtgcttctagacgtcacctagccttaattctcctctggaaataccttcgtttgatgacatatctatgggtggttgctctgctatagctcgcagtttttgtgtttgccaatatatccggtaacattgtggagtcagccgtccactgtatgaagtatgtagtttggttatatatatattgattgtattatttactcgattctatgggttcttggatacctggaatgtgcatgatatttttaaatttttgt

SEQ ID NO: 147 - DNA, 3540 bp, Zea mays
  source 1..3540: mol_type = genomic DNA
cttctcccctcttccatagcatagcagagcaggcgcacggcgcaccgcacacctcactgccgctcccttctcgtctcctctcctctcctctcctcggcggatccggcaccgacccaccgcccctctgctcgctccttccgccggaatcgctgctcctctctgtgctgtcgatttgtgcggcgactgttagtttggttcggtcccatccttctgttggtaagtgatactaccatgccctgagaggaagaggtgcttttgccttttgctttttagttttagattagagttgtttcatttcagttgatcctgccctgagagtgagattttacctttcactcttagttttagattatagttcgtttcatttcagttgatcttgatcataccttgccctgagaatgagatttatgtcctaatatgcagcagtaatcttgctagcttgatcggatcctgtactaaccagttcgtgtcagctagtattttccgctcctttgatcaagaggggggaggaggcagtgcttcatgtgtcatacccggataatcggaagcagaaatggatttgatatgcggtggaggcgcttgttactagtcctgggtggctagatctcatctcatggttctggtttcaagtggaaagtccgttactcgtgggaaacgaatgactcgcatagtttttcgttggatgtttttgctcatcgcgtggatagccgtgggcccacaatagtttctgtaaatcttgaggccaggttggtctagatcccatccagtgattattgtgaccttgtgcttggcagcctaactaggtgcttactgagcttttattgggcgaaccttacatagcttttcctagctaataaaaatatgtatattcatgtcaaatactgctaacccgagccagaatctttgtcaggttatcttggtctaaacagctcaatctttcaaccagccagctattgtttttcccccccttcccttttggcataaacaatccagtttataatctcttgctagctggaatcggaatgatgggcgccactactgacttcttgctggcacatggactttaggctcccatcgtctacagctaaatgaagtatccagcataggctggatgtgcagcagcagcaataattctgatccagtacagcttcttcattttgttaggctcagtagcacatgggcgggcaagtgagcatgtctctgcctgacaggacaccttatgccagcttatagctagtatacagagcataattaatccactttatgattgattcagtgttatatgcttttccttcaaagtcgttagtcctatttaccagctggtccttgttcagagattcattgatggtaataatcttgctgcaacctgagttcctgacctagagacaaggcctgctaaatacaaccttgcattccttttacttggctatcacaaactgctcttagttatcattatgtgcctgaaaaccatatggcctttctcttattaacttaaatttccaagccatctagcatgaactaggttaaaaaaattgtgctttaacaagtgaatatttgagatggtctctgaattcagattgtctgtgcagatcaatggctgacggtgaggatatccagccacttgtgtgtgacaatggcactggaatggtcaaggttcgatgctcgttctatctaccatgttcattcattcatctctgaaacctgtaaaggcagttgttgcagaatgaccagcccatgcttctctctgcaggctggctttgctggtgatgatgcgcccagagcagtgttccctagtatagtcggccgccctcggcacacgggtgtgatggttggaatgggccagaaggacgcctatgtaggtgacgaggcacagtcaaaaagaggtatcttgaccttgaagtaccccattgagcacggtatcgtgaacaactgggatgatatggagaaaatctggcaccacaccttctacaatgaactgcgtgttgctcctgaagagcacccagttctgctgacagaagcacctctgaacccaaaggcaaacagagagaagatgacccaaattatgttcgagacattcaatgcaccagcaatgtatgttgctatccaagctgtcctttccctgtatgccagcggtcgcactacaggcacgtgtccactttcacctcttattaaagtttttctaggacaacgtctctgattctcgtcattggtgatctgacgacaccattctactacctatgtctcggtactctgtgtgcaggtattgtgctcgattctggtgatggtgtgacccacaccgtgccaatctacgagggatacgcgctccctcatgccattcttaggctggatcttgctggccgtgatctgactgactgcctaatgaagatcctcacggaaaggggttattccttcaccacgacggcagaacgggaaatcgtgagagacataaaggagaagctggcctttgtggccctagactacgagcaggagctggagaccgctaagagcagctcctccgtcgagaagagctacgagctgcccgatgggcaggtcatcacgatcggcgcggagaggttcagatgcccagaggtgcttttgcagccgtcgctgatcgggatggaagctcccggcatccacgagaccacctacaactcgatcatgaaatgtgacgttgatatcaggaaggacctgtacgggaacatcgtcctcagtggagggacgaccatgttccctggcatcgctgacaggatgagcaaggagattactgccctcgcgccgagcagcatgaagatcaaggtcgtggcgcctcctgagagaaaatacagtgtttggattggtggctcgatccttgcgtcgctcagtacgttccagcaggtacttattaacatgaccctatcgtcttgctgtaacacttatggtcttaccatggagattatatgctttcttgggtgccttattgcttttatcatgtcttccttttttaagtgaaaccatcaatcaatcaaatcgacatgtgcacatgaacacataacaatcataagttgtcgccgtaggtcatggatatgaactgatcacttttaatgtttactgtttcttcacggtataggcttcttactccaataattttgctgttgcagatgtggatatccaaggatgagtacgatgagtctggccctgctatcgtccaccgaaaatgcttctgagctagctatctgccgcgcctttcatagcgtgtcaagctgttgagatctgcgttgttgagttgagtgtctctatggagtatcacatactttctgcatgaggggggaagagtatacccaactaagcgcatgcctttcggatgccctgcttcgtgattcagatgctgctttctttcaagtgatatgtcgatgtagtgtgcgagcaatgtatttggtttggctacagctgttcctgtcgtctgtgcgtaaaacattagctatgtatctatccatatctgcatatttgaatgtatggtcgttttctcatatggtgtcaagttaaaattcttatgttctctta

SEQ ID NO: 148 - DNA, 3407 bp, Zea mays; identical to SEQ ID NO: 136
  source 1..3407: mol_type = genomic DNA

SEQ ID NO: 149 - DNA, 4820 bp, Zea mays
  source 1..4820: mol_type = genomic DNA
gtatctaaaatttaaagtgcacaaatgatataaagcacaattgctacttgtttaggtgacacactgtttgcatttctcatcagaatgtcacaccagtcacttatgttgcgacccacaagactcatccaccatccaatcaaggttgtgtgatcctcaaggttgtgtgatcctaacccctttctatgtccttaaaccaacaacggcattctgctgcatccatcagcaaaattatcccatctaaagaaaggttgtgtgatcctcaaggttgcttccagttattcagactgtgaactagaggcatcaagagtttttttcagttgcttgtggttcatcgtacctcctgttttgtgcatgctgtaccacaggttggcgaatcctgtacttaccaaattgttctaaaatttaccagttacctcaccttattcctttctaggacaggtatctagcaggtcacttaagaaggccattggattcaaaactcatgtacgctactgtgacacattgatggtcctgaagttgtggacaatgtcaaaggttccctttagatcaaggtaacttctaggtccctttgtctagattatacacgtatactgtgtgtttgagaaatatatttgagccataaatttgttatgcaaatctgaagcataatcgcttagttgtcatcctatctctactcctccttatgtttgtatcgtaggcgtccacattcgaggatggtgcacgattctaatgccttgtctgttctaatgccttttctgttctgatgccttgcctgttgggagtgctctgcctaatgccttgcctattgtccgttctgatgcctgttgtctgttctaatgcctgttctctgcgaactgtctttgtctgtttcggtggaggctgccggcgtgaagcactggccaccgggtgctgcacatcaacggccaacaggggcaccgtgcatgtgggcagaagcagccagcgacaacagtagggcacaggtaaaatgatcacccccactttagaaattgcaatccctattttgatcctcggatgtgcgccatgcacccctggtccctggatgtattttcaatgaattggctatcctaggctacaagcagaaatggcaagttgaactgagttagaagataactgattattcagcgcggataaatattgtttctaaccaagctttctatcctatatttgcatgttcttcaaagggatgtatatggaccttccaaatacactagacttttgcaagcaaccaaagatactctcagagaagaaggtttgccttgccttgaatacttcttgacttatgtcatattgagcatttgagctattgagaaacatactaatacagacattgttgatgttgcacttgcatgcctctatgtaataggctaaactaagcagcattgtacaggatactggtacttttgcacttgcactgtctcttcttgctaggtagagtcctaccccatagtctggaactagaagaattctgattttccttttaggaatcaatgtatatttgagctttgtttggtcagaaatgcattgtagaaaaatttagatggtgagatttttatctttgttctcatttttgttcattgtagtataatttttttcagaggttgttctcatttatctataactttttatttttttacgaaaagtcggtgcatgctgattatgcaccaagaaacatcctttcgcagccccattaatcatctccatagcagccatcgacaaaaaacagtccttgaaaatttagaaccttccttcagttaagaaatatgtccgttactgaaatggagaagggttgcacacatagttcaatgaatcaaaaggaaaattgacctgtagagtaatatggttaaataaatgtttgggcaaatccataaacccttcagaagcttgtaaaatcgataagtagctccacataggctactagctgtttgttgtttaaataaataaaacagtgtaaatatgtaatttaatcgtttggcctctgaatgtaggctgtagtttagttgtagttagaccataaccttgccaatgcaatttcacatagaaaattagaatctcctgttgtgcctcctcttttaccactttgtagttctgtttgcttggttttgtgttagttgtgtgtttcttttctagcttgctgagattgacaatcatggaaaactggcatctaatgagatcaacataaatcttctgtcagttttttaattgtgttgttgtatgctttctttccagcatgctgatattgtcaatcaaggaaaactggtgtctgatgagatcatcataaatctgctgtcaagacgcctagaagagggagaagaaaagggtgaattggggttcatccttgatggctttcctcgaaccatgagacaagcggtaagctaattatttgacctgaccataagtatgcaaaaacaaatacttgcctttgatcaggaagcatttttcacttgctttcgttaacaaaatggcccgatctgtggtttggtggtcaatgccatgttttttttattactgtcttatgctgggagcaaaatagaaacagagaatagcttcaattgatgccttttagaacggaatctgtagagcaactcatggatactttctgcttgttttaataaacgcggcatcgggcgagctctggtgtaggtagaaaatggctgatgccgaggatatccagcccctcgtctgcgacaacagaactggcatggtcaaggtaagccaccggtttggtcacatctgttcttgagaatgcaaggttctcggtggctgctggggccctaacaacagcaccaaccttgacaggctgggttcgctggcgacgatgccccgagggccgtcttccccagcatcgtggggcgcccgcgccacactggtgtcatggtcgagatggggcagaaggacgcctacgtcggtgacgaggcgcagtccaagaggggtatccggaccctcaagtaccccatcgagcatgggatcgtcagcaactgggacgacatggagaagatctggcatcacaccttctacaacgagctccgcgtggctcccgaggagcaccccatcctcctcaccgaggcgcccctgaaccccaaggctaacaaggagaagatgacccagatcatgttcgagaccttcaacacccccgctatgtacgtcgccatccaggccgtgctctctctgtatgccagtggtcgtaccacaggtgagttgattctgttctctgcttaacaatttccaaatccaattttctcctgcagtccgtaatctctaaaatctgtggcctctcttaggtatcgtgctcgactcgggagatggtgtgagccacaccgcccccatctacgagggatacgccctcccccacgccatccttcgtcttgacctggccggtcgtgacctcatcgactgctcatctgcgctagactgtgtttgttcaaaagatattattcaaaatttaactgaaagattttattccttgcacaattattgtattgctttctttgttgaatattatttgcttggtgatgggctgctgttgctgctagcaggattgagaaccgatgggctgcaatctattgttggtgcctggtatcaaagagggagacaggggtgcacctgttcacaatcttgaggtgagaatactgaaactgtctaagagacttctcgaggtgagaataccgaaactctcttaattagaggtgtgtagtaattacacaataacattatcaatcttaattatttatctgattcctagccattgctgccgcctcagcccgcgctcgaccaccgctgccgctacttcaagcagttagcttagctgtggggtaaaatgattggttagcgatcttttctacttttatatactgtctgcatagtacacagtaggtacatataacttatctttatctttctcctcttttcttttgacatgatcaaataagcttctgtatagcttggctagcaaaagttcacccatgtttcttctgtgtgctgttcagattttcactaaaataacagataacatgtacttgatgcagtttaacatgatcatgttgatgttccattgggagcatttattacatttcccaagtgatatgaaatcataccttgcagtttatgtttgacctacactagagaaattctgtttcttatgaacactgatttgatgcagtttcttacaaacattttggtacatcaagatgcatgactaaaaagtggtttccaaaagagcctgaggcatttgctgagtagctcgaagtaagtgtggattcttcctcacagctgcttgttagcattccatcttcctcacttgaaattgtaccaatgcctcctgtgaatgaacttgtgccaccggtggaatgtgcagcagaggttgtttcaacactgtccccacctaggaaattaaggagagctgtgaaaaagataactccaaagaagaagatccaagccatgtacaactgcaatttggttcctgaaatctgaaatgtgtgatcctgtgccatgcaacagcagttggttcactcaaaatgtgtggttctgtacttggataccactgggttcactccaaatgtgtgttcttctttttagtctaaatgtttgtagcaagccagttttattctaaatgtttgtagaagttagtcttggttctggacttggatatcagttggttctggtcttggacagctgaaattgtcacctactactatgactcatgtttaaccgtggcctgcattttggaaagcaagttctggtcttagcactgatactggtgttctctgatcatgcttgttaacaagttctgttaactttgcgaa

SEQ ID NO: 150 - DNA, 2975 bp, Zea mays
  source 1..2975: mol_type = genomic DNA
cctttgcggtccgatgccgcctgcgctgttgtttgctgcgtctccattgaccaggcagcaggggcgaggcgaggtcagagcgagcgagctgttggtgttggccgggtcgtccctgcgctcgggaccgctgccgctaaagcacacgcccagcgcccgcagaccagtcacacacacatacttcggctgctgctctcccatttgtctcacctcgctctcacgcctgcctgcgtcaccggaagcgaccccgcgggcgagcgatccgatccccttcgcggcctcgtcaacgacgccgaggtatagccgtatttctcccttgctctggcaccgattttgttccgaggaagtgatcggctgtaggctttcgtttcgatagacccccccgctcgagcttcccgtcgctgctgacttcgatttttttcgtgtccatttttctgttttttgtcatgtttgtctcggctctggagttcggataggcggtgtggtacggttttcaactttaataaactaccgtcatatgtgtagtcgtgtgctctcctatgtgtcatcatgattactatagtacctctgtgatgtttgattggatgctctgttttatgtttatgtgatgaacttcatgtcgagtttggccagttactcagtcagttcataggagcacatatgattcagcatgcaataagatgtgtgctacgccgaacccgtaaattgttttcaggtcactctgtgaagaactggagatgatcttaagcagtgaaaaatcacacgatcacactctcaaacattcagctaaccattttcctcaaccaaattcccctcccccgtgatcctcctagtgtcagccatccctgcggactgcttggaaacttataagtcaattatcagggtttttttacacaaatttgagtatcagtttcttaatcatgagcagttgtgcacattagttttgactgacgactggcatattgcaatggcggcggcggcggcatgcttcttttgtggggtttaccattgcagcggcggcggcatgcttcttttgtggggtttacctgactccatggacactttaacgattaacaccgagtatagcattctgctgcagaacactgaggaatggctgaagaggatgtccagccccttgtgtgcgacaatggcactggaatggttaaggttcgttctcctgtccagcagccaatccttttgcctgtctattcattactgatctaataaactgatgggatcttgatgccaaacaggcaggtttcgctggtgacgacgcgccgagggcagtctttcccagcatcgtaggcaggccacgccacactggcgtgatggtgggcatgggccaaaaggatgcatacgtgggcgacgaagcccagtccaagagaggcattctgacgctcaagtacccaatcgagcacggcattgtgggcaactgggatgacatggagaagatctggcaccacaccttctacaacgagctccgtgtggcgcctgaggagcaccctatactgctgaccgaggctcctctgaaccccaaggccaacagggagaagatgacccagatcatgtttgagacgttcagctgcccggcaatgtatgtgtccatccaggccgttctttccctgtacgccagtggacgaacgactggtacgttacgttgctgcatcgaacctgtttcatgtcagcattcgaatagcagtacgtgtagtgagtggcgacaatctttctgtgcaggtattgtgctcgactctggtgacggcgtgagccacactgtccccatctacgaagggtacacgcttcctcatgctattattcgattggaccttgccggtcgtgacctcaccgacaacctgatgaagatcctcaccgagaggggttactccttcaccacgacagccgagcgagagattgtcagggacatcaaggaaaaacttgcctacgttgcacttgattacgagcaggagctggagacggccaggaccagctccaccgtcgagaagagctacgagctgcccgatggccaggtcatcacaatcggcgcagaaaggtttaggtgccctgaggtgctattccagccatccttcattggcatggaatctcctggcatccatgaagccacgtacaactccatcatgaagtgcgacgtcgatatcagaaaggacctgtacggtaatgttgtcctcagtggtggctccactatgttccctggcatcggtgaccgcatgagcaaggagatcactgcgcttgcccccagcagcatgaaggtgaaggtggttgctccgccggagaggaagtacagcgtttggattggtggctccattctggcctctctcagtaccttccagcaggttgttagtttgttactgtctcaaaatctaaattcaacgtttctgcttgctttgcagttctagtgtatatgaagtttgatttattaatcttgttattgtgttgtgtagatgtggatctccaaggaagagtatgatgaatctggtccaggcatcgtccacatgaagtgtttctgaattctggagctgtatatctgttatttacttatattttcagttagttgggatgctagattgtcccatggtttctctagcattcttggttctttctaaatcattgaagggctgttggccatgaagcattgtgaaagatggttaggtcgactgatgtactacatgaagaaacatgtgtaacttcagtagtacggatggtcaggtcagtgttttttttttcaagaccaccagatcagtgcgttcctgatatgcgcgatctgggtttctacacgacgcaagggtgccggctgtcgcgtgtcgcccatgcagtttgagtctttgagagttcagttggtttatgcacttctgtacgtggtcatggaatcattcgcatttgcgccccgccgtggcgtggttgttgatttatacttggatatgtttgttttattccttctcatgaaacagctgttgttgtctcta

SEQ ID NO: 151 - DNA, 1907 bp, Zea mays
  source 1..1907: mol_type = genomic DNA
tccccttccgtccgctacattcctgctctctcgctctcctcgctctcagaccacagttgccgccgccgccgccctaagccagggtgctgaggctttcgttggcctcttcgccggcagcgagcacccaccaggtactcccaccccttctcttcccttcccttctcttcccttgccttcatgttgtgcgaagctgcgaaccgtcgctcctctgcggggcgacacgggcggaacccgcgccgccgctgcaagagtttgctcgccgccgcctgagcacgcggccggaggcccgcgccggtgtgagggtggcggcagcgaggcctttgtactctcctcgcgagttccctccccaagcgtgcttgcctcctcctgcctgcgccagctagggccgggctcgatctggtgcgctatggccggatccgtggcgtggcgtggcgtggcgtgggtggagatccacttgcaggggcacggatccgcattccatgagtccggatctgcaacagcagttctgtagaaatggcgatcccggtgtggttatttccgcattcccggtgtggttgtttccgcccgagtgatctccgtcattcacaaatctgatctgaccagctggtggatgctgcagtttgctgtcaaagataatgtgtgttgtcatgcattctgtatcgcaacccaatttgtatgagaaagtcgcatctcgttcccagtttcctgcctgtatggtgagggattgcgcacttgcagaagaactgagatcagagtaagaacttggtctctgcaatacttacgtatgtgcctcaaatgcttgaaatgcaagtattttgttggcgcttctgatggtatttatcccctcttcttcttttttatactggtcataagctgccggttttccattgacttgacagtgaatacagatcaagcatgatgaagtattctgccattgttactggcgtggtgtatattcgagagtgatattagttcgcactgtaagtggttaccagttaaaatatgtttaaatagtcgtgaactgtgaatctggaatacttgcttcttgcttgatgaaaggtgactaggtgcacagccacggttccttgacccactgagccgtgttcagcagttcactgaaatggtcacccaaaactatccatatgattgctcaaaacactattttcgattgtagactttactgatcgtagagtggagtttaagtatgaacataggatgtagactctactgattgtttaagtatcaacagcagttctatccatatgcgccacctgcagcagttctgtagaaatggctaatggtgaggacatccaacctcttgtctgtgacaatggcaccagaatggtcaaggtcagtgctttccccccttaatttgtacacccatagtctcccccacccaaatatgccactaattatatgtatctatcttctaggctggttttgccggcgatgatgcaccaagggctgtattccctagcatcgttgggcgtcctcgtcacaccggtgtcatggtagggatggggcagaaggatgcatatgttggtgatgaggcacagtccaagagaggtattctcacgctcaagtacccgatcgagcacggtattgtaagcaactgggatgacatggagaaaatctggcatcacactttctacaatgagctccgtgttgccctagaggagcaccctgtgttgctcactaaggctcctttgaacccaaaggccaacagggagaagatgacccagattatgttcgagactttcaatgttcctgccatgtacgttgcaattcaagcagttctgtcactctatgctatattgaatggtacttatttatattatattaactcagtaagccttcttgactttgttaacagggagaagatgacccagaggagcaccctctcttga

SEQ ID NO: 152 - DNA, 3250 bp, Zea mays
  source 1..3250: mol_type = genomic DNA
gagggaagagggaaacaaatatccatttcacgcgtgaggcaggaatacctagagaaagatacatcatttttaagacaccttgttaatgtatgtgctggccacaagcaagtccagacgagtgcactattttttccttaaaaaaatactccattcgttttaaattataattcgtttaacttttcagtccaaatttgatcggctcattttatttaaaaaattcataattattcggaatgagtattttagactagccgtcgatgcatataccacctgcattcccctttcgtccactgcattttatccttcctggtgctctgtccacctctctcgctctgggccgccgccgccgccctaagccacgtgctgaggctttcgttggtctcttcgccggcgacgagcacccaggtactccctcttcttctcttcccttcgtgctgtgcgaagtcctttgtggggcgacacgggcggagtccgcgctgccgccgcaagagttcgctcgcctcgctcctcccaacctcgccgtcgcctgggcgccggtccaaggatggcggcggcgatgcctctctgctttcctcgcgcgttctccccccaagcgtgcttgtctcctcgtgcctgcgccagctaggacgcttccctggacaagctgccgtcgtcgtcgctgtctcttgcgtggacgatgtcctgccggacggcgactcagcggtggcgccggcctcgatctggtgcggtatggccggatccgtggcgtggtgtgctgtgggtgaagatccacttgccaggggcacggatccgcactccatgagtccggatctgcactccttggaggtggtgaggtgattcaccggcaacaacagcggtgacatctcgacgcacgcgggtggcggtgctatggcaccctcctagctccgaaagtctttgtaaaaaaaattaaaacataaaaataaaaatattgggtgcccctttactgggcttgcccctgaatgtgatgttgcaaatttcagatgcatcagaaactgttgtccttgtgcgaacttttctgtataaattgaatttaccgctctcagttagcatgcacattcaaatccactgttccttttcaaccacatagtgaaccaaaacactctcatcactgagcgatatatgattctatccatatgccacttgcagcagttctgtagaaatggctgatggtgaggacatccagcctcttgtctgcgacaatggcactggaatggtcaaggtcagcccccgtccctgactttgacaacctttacttccaaatatgccactaattatgtctgtcttttaggctggttttgctggcgatgatgcaccaagggcggttttccctagcattgttggccgtcctcgccacactggtgtcatggtagggatgggacagaaggacgcatatgttggcgatgaggcacagtccaagagaggtattcttacgctcaagtacccgattgagcacggtattgtgagcaactgggatgacatggagaaaatctggcatcatactttctacaacgagcttcgtgttgccccagaggagcaccctgtgttgctcaccgaggctcctttgaacccaaaggccaacagggagaagatgacccaaattatgtttgagactttcaatgttcctgccatgtatgttgcaatccaagcggtgctctcactctatgctagtgggcgtactactggtatgacctgatccttcctttagtttggcgttgattcagtttcatagttctagctagcatcatctctttgatcccaatatgctgttgtcaactgtttatctgaggctattgtcaaggtcatacgaagccacctcatcattatcttctattcttgctcatgagtcatgagattgcacaactcagatacactgcatgtgtgtttaccacctcagtctgtatgttgatatgaattcagtaaaaaaataagtataatatatcaagaataaaatatggaagttaaacttaattgtttacatggtgtggctgaagtttcctctttttcttttttttcccttatcttgtttactttctcaatctacaggtattgtactcgactctggtgatggtgtgagccacactgtgcccatttacgaaggatatgcccttcctcatgccattcttcgtttggatcttgctggtcgggacctcacagactccctcatgaaaattctcactgagaggggttactccttcacaacctcagccgagcgagaaattgtaagggacatcaaggagaagctagcatatatagcccttgactatgagcaagagttggaaactgccaagaacagctcttcagttgaaaagagctatgagctacctgatggacaagtaatcaccattggtgcagagagattcaggtgccctgaggtcctcttccagccgtcgatgattggtatggaggctgctggaatccatgagacaacatacaattcaatcatgaagtgtgacgtggatatcaggaaggacctctatggtaacattgtgctcagtggtggttcgactatgttcccgggtatcgctgatcgtatgagcaaggagatcacttcccttgcaccaagcagcatgaagatcaaggtcgttgcaccgcctgagaggaagtacagtgtctggataggagggtcgatcctagcctcgctcagcactttccaacaggtatgtattttctatatttgtttcagctgcagcacttcatttcttttaactctattatcgccgaaatgaaatcacttctgaattctgttattatgtgccactgatttaccagatgtggatatcgaaggaggagtacgacgagtctggcccggcaattgttcaccggaagtgcttctagggtttcacaagttcctcgtcgttacctagtctcaaattatgtcccctccatttctcgagatatgtgtggcagatttgcatgatacgtttgtttgtttccatcggacctgaagtcttcttggggataggctcccccctttgtatgttgtggctccaatccatgtgcgagcacgctgtgtctgtcgtgacacctggttcgtgagatgggttgtcaaacttgattggtttgttgtgcgtggctggaagagctgatagttatatatttggcttggactgtgccgcttgtatgtatctgaattctgaaagcgttgtaatctgagcatccgtgcaaagtatgaatggcccttttatatgggctggattttccggtttctatacaatttggtgtttgtcga

SEQ ID NO: 153 - DNA, 2526 bp, Zea mays
  source 1..2526: mol_type = genomic DNA
gcacgtacggcacgtcggggctggctcgtccgcccgcgagtgggaggccactgtttcctctgcctcaccgggtcgtgtggcggaggggcgtggggccatggttcgcagcgcggggcgacgagcgcgctcctcctctcgcgcagcgccagcgccaccccgcaccgtggctttatatacacccctcctcccaaccctaccgaatcatcactaccaccgctctctcttcctctcctccatctctcaacgcctgaagctcaccgcacctcccctcctcgccgcggatcccccactactccggtaaccgtctctccattcaccctgcctgctgtctcgctagaatcgcctgcctctgccagcgccgtgacgcgggggcgcggtatggctctcccagatccgcctggcattgctcgctcgggtcgtgccaggccgatctgatctcgcatttgctgcgcgctcctcctgctgcggatcccaccggatctcgctggaatcggagcgcgcgtctctttgaaatgccgcagatctgcgtgcttgcgcgcgtgatctaagtccgggcctttcgttaacgaaatggtccgatctgtggtttggtggaggcaatgccatggtttttccccgtgaattttttttgctgattttaggagcttttttctactgtcctatgttagtaggacaaaaaaaaagaaacatagattagcttcaataggcgccttttagaacagattctgtacagcaactcgtggaaacaaatctgcttccttaatgatgttgcttgttttaacaaatgcggcatcgggcgagcttttctgtaggtagaaaatggctgacgctgaggatatccagcccctcgtctgcgacaacggaactggcatggtcaaggtaagctaccgccgatttgttccctgaactaaacacttattcttcagaatcccctaacaacaccaacttctggcaggctgggttcgccggcgacgacgccccgagggccgtcttccccagcatcgttgggcgcccgcgccacaccggtgtgatggtggggatggggcagaaggatgcctacgtcggcgacgaggcgcagtccaagaggggtatcctgaccctcaagtaccccatcgagcacggaatcgtcagcaactgggacgacatggagaagatctggcatcacaccttctacaacgagctccgtgtggctcccgaggaacaccccgtcctcctcactgaggcgcccctgaacccaaaggctaaccgtgagaagatgacccagatcatgttcgagaccttcaacacccccgctatgtacgtcgccatccaggccgtcctgtctctgtatgccagtggtcgtaccacaggtgagctgattcgattcgattctattctccactgaaccgtttccacttggaaattagtgatcttcgctaattttcaaatctcatttgctctcttgcctctcaggtatcgtgctcgactcgggagatggtgtcagccacactgtccccatctacgagggatacgccctcccccacgccatccttcgtctcgacctggctggccgcgacctcaccgactacctcatgaagatcctgactgaacgcggctactccttcaccaccactgctgagcgggaaattgtcagggacatgaaggagaagctcgcctacattgccctggactacgaccaggagatggagactgccaagaccagctcttctgttgagaagagctacgagctgcctgacggacaggtcatcaccattggtgctgagcgcttccgctgccctgaggtcctcttccagccatccttcattgggatggaagctgctggtatccacgagaccacctacaactccatcatgaagtgcgacgtggatattaggaaggatctgtatggcaacatcgtcctctccggtggtaccactatgttccctggcattgctgacaggatgagcaaggaaatcaccgccctggctcctagcagcatgaagatcaaggtggttgctcctccagaaaggaagtacagtgtctggattggaggatccatcctggcatcgctcagcaccttccagcaggtaaacaaacgcagcagcggccaaaaaataaaaaaaacgcattccgatttccccaaatccgatctatacctgcttacgattttgcttccatctgcagatgtggattgccaaggctgagtacgacgagtctggcccgtccatcgtgcacaggaaatgcttctaattctttgggcccaagagatgcaaagccgagaggagccattatcgccagcctcccgccccgtttctttctccttttgttgctgtttcttcattagcatgaacaaagttttctgccggtctatcggcggccgctttctcctattcatcaagactgtaatgtctattgctacctaatgtttctcactttgtcattttggacacatgttcgacctattcaattttaatgagatgcctgatgaggctacttgcaaaaatacatgtggtgttctcaatgaataatatcaaatgttgagctctc

SEQ ID NO: 154 - DNA, 3774 bp, Zea mays
  source 1..3774: mol_type = genomic DNA
acgctcgcagcaccggccgttttctacgggcggtgcagtggacgggagtagtaccctttctttctcttcgaagaaaatgcggcggcgtgtggtataaaccccgcccgtcacgccgggccgtccgtgcgtttccttttgtcttcgcttgcttcctttcgaaagtccttgcgtcacactcgccgatcgatcgagtctctccggattccagagaggcccaactgccgaagccatcgatcgccgccacctcttcgagcaggtgattattctccctcttgctcttcgatctcatcttctctgtctccgcggaatcgtactaatctcccgacagatcgcctcaccaagtcaccagtcaccaggcctttgactggtgttgtccggtaactttttttttttgtggtttctacgtctggcgcgctgctgatttttccgcggttctgtttggtttgtggtgatttgctgcaagggtaaaggaattcgaactttgctgggatggtaggattatgctaaggcatgctggctagctatgtttggattgtgctatggcgcagtgccgacagtacccgactttgctgccagtggtgtctcctattatatgattttttttttcaaataacaagctacgaatttactcgctgcccaaaaaccaaaaacaaatcgtagaaaccgctgtccgctgagcttgttggttccccgttgacctctagttgccagggtagtaagtaggaggcgtaatttttttgattagaaatgtccgtcaagcagagttccaccaagcatatgttgatagagcaggatagtgctggttttattgcttcgggccacagcagcagcaaggccagatgggaaaaaatatcccaaaaggaattattttcctatgaagttgtgtgtgaccaatggtgatatccgctttattttgtagaaaactgagatcatcggggagcagaatttctctgactccgcatctacatctatacgctcgaatacttagatctttggtattttaaggctgctgtactgctgtagaaacataaagcttttccctatgcatagaagtcacaattaaacgacagacaattatcaaaacataaagcttttcccttaaaccatgagcagaaagtgtattttgattccccgaccaggctgcataactgcatttttctatgaatgtgtactgaacgctgaactttggtctgttacagaatagttgagaatggctgacgaggatatccagcctatcgtatgtgacaatggcactggaatggtcaaggttgttatctcgttcagaagtcttttccaacaaagcaactctactcctgtgacctaattgttgctcaactcctcaatatttacaggccggtttcgctggtgatgatgcgccaagagctgtcttccccagcattgtgggaagaccacgccacaccggtgtcatggtcggcatgggccaaaaggatgcctacgtaggtgatgaggctcaggccaagagaggcatcctgacactgaagtacccgattgagcatggcattgtcaacaactgggatgacatggagaaaatctggcatcacaccttctacaacgagctccgtgtttcgcctgaagatcaccctgtgctgctgaccgaggcccctctcaaccccaaggccaacagagagaaaatgacgcagattatgtttgaaaccttcgaatgcccagcaatgtatgttgctatccaggctgttctttcgttgtacgctagtgggcgaacaactggtaagatggctgtcgcctcagatatatatagtgatatgcactacaaagatcatacatacatacggcaatcctgacacggtctctttgtcaaatatctctgtgtgcaggtattgtgatggattccggtgatggtgtgagccacacggttccaatctatgaaggatacacacttcctcatgctattctccgtttggatcttgcggggcgtgacctcaccgaccacctaatgaagatcctcacagagagagggtactccctcactacgagcgctgagcgggagattgtcagggacataaaggagaagcttgcctacgttgcccttgattatgaacaggagctggagactgccaggagcagctcctctgtcgagaagagctacgagatgcctgatggtcaggtcatcaccattgggtcagaaaggtttaggtgccccgaggtgctgttccaaccatcccttgttggcatggaatcgcctggcgtccatgaggccacgtacaactccatcatgaagtgtgatgttgatatcaggaaggatttgtatggtaacgttgtcctcagtgggggatctaccatgttccctgggattgccgatcgtatgagcaaggagatcacgtccctggctcctagcagcatgaaggttaaagtgattgcgccacctgaaaggaagtacagtgtctggatcggtggctctattttggcttctctcagcacttttcagcaggtcttctctttcttactttattctttcataagcagtaggcttttatcattcaactcctcttcatgagaacctacagcagccttgaccatgttgggtgtgtgtgctttttttgtagttaaagtggaaataacccattatataccaactcaatttaggttaaactggcttgtgatgcactcttttttacctaaaaacgcaattggaatacaaatatattcttgctttagtcagttactccagttttctagtatcaacttctcttagggcccatttggaacgaaggaaatatgaaggatttttgaaggattcattccctacatagaagtttcctatgtgaccctttggaacacaggatttaatcctatcaattcctttgaaatttctatggattgctttcctccatacaagttttggaggaaaataacaagagctccaatctcttggaaaatttcctatgactcttatctctctattcaaattcatgtatagcacccaaaggctaggtgagaaattttgctacgttctcaatttctgtaggattgcaattcataggcaattatagtcatgtgttttctctattcctgtgttttcatattcttctgttctaaaggggggcttagtaggcactgcacatgttgctccatcctccgcgttgttgtttaatcattacgttgtttaatcattacagacatagatttaaatttgatagtaacatctttttgaggaaatgaaaagattttaaggcctttttcttcacgatagatataagcgggatgtggaaatggaattactagtgtgatagcaccgaatatttttcttgcattgccattacttgcactcattattttaatttcatttctttgacaatgggcaactgtgttggcagatgtggatctccaagggagagtatgacgaaactggtccgggcattgtccacatgaagtgcttctaagtttttttgggaaatttttccaaaaaaaaaaagaagtttctggggaagttcgacatggtacgtcaggcgttaccggctcattgtgaaccaatacatgaactgccatgataaggttataagcagaaataacagtagcactggctccaattcctgaagatgagtctggtgcgccctgctgtatgaaatggatcccactcgtatattcgtcaccgcgccgcactggtgtaacgtgttgcctcagagtttgcttttagctggttccttttttaaaaataagtactgtttttggttggctaccagtcattttgaacttcagtagcaaattatcttatttaatgcttgctttttcatattt

SEQ ID NO: 155 - DNA, 7869 bp, Zea mays
  source 1..7869: mol_type = genomic DNA
gaacacaagagaagcactaacgacacgagtagtactgatcagggtcagggaccgtccgtagtttcagtcccgctcccgcagtctggttcgtcttctcttctccccacctgtctccacaattccccataggaggagggggaggtagagaagcgcgaatggagagcaggaacgtagtggtgtgcgacaatggtaccggggtaagccctcccctccctgatccacaccatctccgcttccttcctagactagatccgccgcccgttcttactctgggtcacgcccgagtttctcgcgtaccaccccgacgcaatccgctgctgcttcggccaccgactcggaggagccggttcgtgagtggaccgccggtggatggattcggctggacggtggctgggagccatggatgactcgaagcgagacacggttgtttgctggggcatcggtcgccgcagtttggtagttcaggggcattggattagcttgaaaccacatttgctgacgcagtcgggaattgttattcacaaacaatggcgtggggtgctcgaaaagttggaaaaaattgctattttagcccttctaacgtgggctctctgtatattcaaaatttgctggtcaaaaatgtctaggtcttgtgttgacagcgtatttgggttaagttccatccccccccccccccccccccccccaattttttgttcagttgaaaaccataaattatttcatgaatgtcagacatatagtctgtagaacaatgcagttactagatagatatattgatgcacagaagaaatgtcgattcagcctgaggcttttagtacaagctaaattttctgtgtacatgtgatatcctgctgaaaatttggtgaccttaatctgctctcagctttcgccagtattataatacattatacggacagatgcgaggcttgttgagtctccggtatgagtaaacgacaatgagccagattacaaaagtggatgattcattctctaattccacaccttctggtcgcagtatgtgaagtgtggctttgctggtgagaacttccctacatctgtgttcccttgtgttgtcggacgaccgctacttcgctatgaggagtcacttcaggaacaagaattgacggtctgaaactatttttgttaccatctttctggaacttacttcatgttcatgggtacatcttataataggtgcttatgttcgttgcaggatattgttgttggagcagcttgtgctgacttgagacatcaacttgatgtatcatatcctgttaccaatggcattgttcaaaattgggatgacatgggccatatctgggatcatgccttctacagtgagctcaaggtatatctatattgctggtatgctttgcccttacttgttatgccataccctttctccaaaaagttgatatccttaattatatatcctaagtctcccagctcttggtaaactgagacctttcttttttttcttcatttaggttgatccatctgagtgtaaaatcctactgacagatccaccactcaatcccgtgaaaaaccgagaaaaaatggtatgccatttccttttatcaatttgtcacatactgccacatctgtagtttctaacatcaatgcgtaaaaaattgaatcccatgaacagatcgagacaatgttcgagaaatataactttgctggggtcttcatccagatccaagcagttctttcactgtatgctcaaggtcatctctccctcctgaccatgtgctcctgtctggggctttgtgcatccacacaagcacatacaagatcacattaacactccactctacatgtatttattatatgtttcaggcttgctaactggacttgtgatagattctggtgatggtgttactcatgtggtatgtcaataccgttcttccctatatttgactaagtattatggtttgagagggggggggggggggtaatttctaatcatcttcgtgtaaccagctcaaatatcatggtagcatcatattaacccagaacactgtaggatggaattttaaatagtgcgccagtcaatgattcagtacgctgtatgaaagcctttaagaatttgggatctttacatttataaattagagatcaatcacatatgaataatagcaaaaagatataacactatctaattgaccattgtatattatctggtttttaaactatgtttgaatcctctgcatctcatgctcttttttgttttcagcgtgtccttttgatgtttttacatcattttcttttaaaaaaactacaaccatgcaattttgctcatgttgcaaaacctatttccatttgggatattaagtttggaccagagatcaaccttctttatccctgtgcgacaagtgtctactttaacaaatactttgatatgaagcttttaattttaactaatttattccacttccaatcttaaatttgtacctaccatctttttcatgcattcaggtgcctgtagttgatggatactcttatccacatctgacaaagagaatgaatgtagctggaaggcatataacatcttatcttgttgacctactctcaaggagagggtaatacctatctttctctgaagatttcttctgcagttgctgctacattatttttataattcaattaattctcccactttaaaaggtatgctatgaataaatctgctgactttgagactgtcagagaaataaaagagaagctatgttatataaggtaagttgttttattttcttaattattgtttctgtcttgctggatatctagtcatgacagttaaattatgtacagttatgattacaaacgagaataccagctaggacttgagaccacaatccttgtgaaaagttacactgtaagtatgttgtcctgcttccatttcttccctgtaccttttcttactgtaagcttagtttttgtgatcagcttccagatggaagagttattaaagtaggcactgaacgatttcaagctcctgaagctcttttcactcctgtaagacttccatttctgtttctgcataatgttattgatcacagtatgcaattgtgtcagcaaagtcagcaataagttattattcaccaaatatttgtttaacaggaactgatagatgttgaaggtgatgggatggcggatatggcattccgttgcattcaggaaatggatattgacaacaggatgacggtatacatgtcttaccagttcaatcgttcaatagttcaaatgaaacatgagctaggacactagtgaattcaaacttcctcaatgatttctgcctgatcgtggttgtatatagtcatatatactttggtgtaatatttttttatttaatatatttgtatagaggctgtaatactgcattcttgaatatagcaatttgacagaatactactattagacttgtggatacttgtctcattgtcttctttgcacgaaacacaacttaaatgacataaattgaacagtatagtgcttaagggtatttagagtgttgaatttatttaaatttatgtgacatttatattctggactaatgtcaaattcaacaaaggggctgaaaccatattaaaaaatagtttgatcaggttgcacatctttttcccttattagaatatcttatcatgtttcacagctctatcaacatattgtcttaagtggaggaagtaccatgtaccctggtctgccaagtcggtaagactatattcttttttatgaattcatgaggatatgcctgccttgctagtgtatagttttgcttgccgctttgctagtgttgttggttgtgtttggccttggtgccaccctgtacataaaactcctattttccccttaatgaatgacatatctcctgcccctactttcaaaaaaaggagagacgacagaagtcttcaaaaaaagtgccatcaaagatgacacttggaaggaagaagttggcacaaacaatatgtgaaagaagatggcaacctacatttagaaggtggccttagaagtgtgtggagcaaccaaagggagttgaggcgaagttaaagatatttggtgtaacgaggaagaccaaagggctattaagggtgtttgaaactgttctgctccttgttttgcaactctgctccacaaacaatttatgaaacacattcaactccaccaactctactgctcaaaaaacttggagttgaagccaacccaactgattcggttgagcagcaaaagaggtgctctagaaattgaggtttcctatatcatcgtgaagttgcaaagtatttacccacctgtcactgattacataaaaaacattccattctgttcacttccccatacacaaaaaagcaacaatggtggcggcctatgggtagggcggcaacactgtgctggggagggacagcaacgaccctgcaccggctggagagggagtgtgactatgaccatcgccgccatcgtcgcttaggacctcgcccaggacctcgcacccaccgcccactcatccagccggctccttcgccacgccgcctcctccacgtcggtgggtagctctccccgtcacgcctcctcctcctggtggctcgtccctgccgctcctcatggccgatcagtgggctcacccctccctttcctcctcgcgtctggtcggtaggctcacccccacacctcctcgtggatagtcaggcgttgcaaccctaccgctcctcggtctgcgttgacgagcggggttgcactggcgaggatggagattgccgcctcatgcctcacgttgttccatcgagagagatgattgggataggagagaaacattagacttgggtcacctacatgtgggtcatttaaaacaaatccctgaaaaaatttgtcattcatggagttggagtcaaatgctaagccaaacacttttttctattccaactccacatgaagcagctccatggttgagttcgtggagtggagttgaatttgttggagtgtagcaatcccaaacactccctaaggaggaagaatgctacaaatgtgtgtaccatgacagaagtgtagacaacatagagaagtacaatttagcaaagaagatcacaaaacgacctgtaagtgtggcaaatggtagggcatacgaggatctttaccagcgtttgagtacgaagaaatgaaagaaggacatatatgggatgacttagggttcgtgagaggaagacaagggacttcaaccaagttaagtgcattaaggatgaaccagagcactcttggttaaggaggatgagattagacatagatgacaagagtattttgataaattatccaatgtggagaatgtggacacaacttttcacttagatgactcttttgatgacaccaataggagatttgtgcataggatccaagaatatgagggctttgatagtatcccaattgaggcatggagatgcatcgggcacatagctatattatggctaaccaagttgttcaatcatatcttccagtcaaacaagatgcctaatgagtggagaagtgtattggtactgatctacaagaataatatagatatttaaagttgtactaattaccggggaattaagttgatgagccgtagtataaagctataggagagacccatcatctaaatatctaatagaaataatgaggatctgtataaaccaatttggtttcatgaccggaaggtcaaccatggaacccattttcttaataagacaagtgatggagcaatatagcaagtagaagaagaacctacacatggttttcattgacttgaaaaagacttactataaaataccaaagaatgctatgtggtgaactttggacaaacataaaattccaaccaggtacattggactcgttaaggacacatacaacaatgttgtgactagtattcgaacaagtgataaagacataaatgacttcctaattagaataagactacattaaggatcaactttgagcccttacccttttggcttagtggtggataaggtcaaaatggacatacaaggggatatcccttggtgtatgtgttttgcggttgattttgtgctagttgatgaaagccatgcaagagtaaatagaaactagaattgtggtgggagactctagagtacatatattttagaccagctaaaaccgaatatatgagatgtgacttcagtacttctacacttgaggaagaagatgttagttcggaaggtcaagtagtggctagaaagtatatctttcactatttaggataaatactacagagagatgggggtatcgatacccatacaatcaaaacagggtggataaagtggtgccaagcatttggtggtatgacaagatggtaccactgaagctaaaagacaagttttataggacaacaattagatatattgtatgatgctgactgttggcatataagaatacgacatgttgataagtgttgtggaattacgtaaattttggatttatggccatacaaaaaaggatcaggtccggaacaaagatatataggctagtggtagcaccaattgaaggaaagcttgtctaacaccggttgagatagtttggacatgtccaacgggacctctaaagacaccagtggtgtagtggaattctaaagtgcattagcaatgggaggagaggcagtggaaggccggagttatcatggaaaggagctgtaaaaagagacttgaaatgatgaaatatacctaaagatttagccttgaatagaaagacatgaaaaatagatatctacgtgcctgaaccttgacttgtgatttttgttgggtttttttttcgaaagcaaaagattgagacctgtcagacaacctgaaggccaccctagccaggtagcctaccctaacttgcttgtgattgaaaggctttgttgttgttgttgttattgtacaacacggaaaaacaaaagtttgaaacaacatattacatactaattgtttttatttttggcagccttcttggatattattgtctgagtgcctgtaatgtttcttattgattgttttttttccgttgagttgcatattcttaaacaagttactactttttttacaaggttggagaaagaaattcttgaccgttatcttgatgtagttttgaagggaaacaaagatggcctaaaggtaatatgcacgaaattatatttctatggaccaacagagttgcaaggctgttgatgttctaccttgcattgttgtaattattggcccatagttgttatacttctctgttgacctttgcaacaaatttattgaactcatgcattggtccatactccatagctgttatactcattgaccgaacaattcaaatacgttttccgaaaggatatgcattcatgtcagcattaccaatttagcatgttttctctgtttcctgtggtgacacattctctaattgtacacagaaattacggctgaggatagaggatcctcctcggagaaagcacatggtgtatctgggaggtgcagtgcttgctgggatcatgaaggtaattcttgtatatgcgaatggcatttacactgtgatggattgctagcaatatacttccccgcgtactgtttggaacgtgcaggatgcacctgagttctggataaccaggcaggagtaccaggaagaaggtgtagcgtgcctaaggaagtgcgggcagtcataagtcttgccacatatcatccacagaagaaatggaggttgcatgtgtaaagaagagctctgttgttggtgttgtgtattgtagtgagctatagctgtcctgaacatgcttggggataaaccatgtttgtattggcctactcaatttgacctctgttattgatcatcctttttagatatggaacatgacggccacctttatttgtattt

SEQ ID NO: 156 - DNA, 20066 bp, Zea mays
  source 1..20066: mol_type = genomic DNA
agaccccctctcgcttcgcccctcctcatcctctctcctctctcccccgccccgttcgtctccggcgagctagggtttgcccccccgccttgccaccccacggttcccgccatccttggatctccagccatgtacggcggaggtaagatctctcaccctcccccagtcccacgcatgctcccgctaaaccctaaacccctggagatctccctgtgcagacgaggtttcggcaatcgtcatagatgtgggctcttacagctgcaaggcgggctacgcaggcgacgacacccccaaggccgtcttcccatcggtgaggcaaatgcttttctgctgcttcggaactctcgccccgttccccgggtgtgggtgtgttggggggcgcagtcgcgcagacacttctgcagtgtccctaagctgaggcaaaatgcgtttccgggatgcactggcgagttggcactttacttttgattgcctgaatcattttaggctgcccactctaaaaaaatggttgctgccatcaaatctaggttcaaacacgagagactaccacttcgcttgggttgatacaggtgtatcctcagttttctttcgattctaggtgggttcagctcagtctgtgaatctcatgagtcagacattagcgtgcacatagattcttctgattaatgtatgcatacttcattcccgagtgacaaagttagttagtgattcagctttatgtttgctgcaagccatgtggtctagcccaaacggtgactagttgtcagtagtaggctatcagctctttgtcgggtattgtgcagatatcttcagtcaagtcatacgatgaatcctaatatctgcatgtgctgggagcttcttgttactctttttttttgtcggcttgcctcctattgattctataggctaaattcagaacctatgaaaatgagtgatagtctaaaggacatcttctgtaccagtacttaaataggaaattattcttgtcttatcttagtttcgaccatgtccacattgtgaggctatcccttgtagctaatggacctaattagttagtactgcattctgggagtaggttgttagctttactatgttgagaagaatgggaagacagtgtatatgtagaaatcacaaatgttaaggatttaccatgttgtacaataaattatgtttttaccagcgtcgataaagaaggttttggagttgagtatttaatgtctaattcagcacatctgtcatggtttatcaattcaattgtgttgtgatctacatataacaaatccttaccgtgcttttcaacatgtttaggttgttggttcaattgaacaaactgaagacacagatgaccccaagccagagaaggaagctgactctgcatcagattctaagaacggtgccaagcccatggatgtggacaaagccaagacaaaacgcagactttatgtaggccaagagttagagttcaggagggatcacatggaggttagtatctccacatactcaatattaacttttgatgccattattttgttaaatatgttttattgatgatctttcacctactacccatgcaggtgatttcatctatgaaagatggaacggtaactgactgggatattgttgataatatatggaatcatgctttcaggtgaattttgttatctatttgatgtgtttctgagaagtttctgctctttagattgtgatgaattggctactggggtcgtattccagggtattatttgaatctgaacattgttaatgctttactcttgctactttctatcgacctggctcggtgtgctggttgtgtatgttgatcatgaaatatcctgctacgtttgctactcagatacaatttgttattttctggcttgattcaattgctggggatgatattatttctctgtaagccaatgttagttaaattaggatcttcaatttctggtgtggttctgtaatatgtataacgtacttatttctttgccttttaatgtccacctgacttgttccacatttcagacggaggttgttgatcaatcctgaagagcatcctatgctcattgctgaaccatctacaaacactgcacagcaaagagagaagtatgtggatgctttgtatttaatatgtccgtgttaccaaaactgtgagcagtactactgggttcctatttgttgacagtcaggactgacagttttattaaccaggacctgattttctatctgttattatggatttgactgcaaatattactattgttttgttatgcctttttatatttatatattttgtatatgcaaattgttccttcttgtgctgtctcgtttttgggttttatctctactccacccagtgtttttaaggcgtcgcctaggtgtccaggcgctcggatgattctaggcgccttgcccgcctaggcgttaaggtggtggtcatgtttacttgcttgccttaccaccttaagaacactgacccaccccaaattgcttgggactctaaggctgctgttggtgttttttgggaatagtcctgttggcatatctgtcattcgcttactctactagttgtaatgtcatgctatatcaaggcaggacggttttaacaacctaattttctcctggatatgatttatactaatggatttgtggaatatggatttattataatgtatccaaaattatgtttgtaatgaattgctatgcctatacaatctttccttatgaccccagaaaggcttaatatattcatgtctgactgttgttttgcatgttttcatagagcagcggaacttatgtttgagaactacaaagtgccagcgctgtttctagccaaaaatgcagtatgcctctgtctgtctgtcatgatcgattcctgttgcaattattttattatttttgatttttgattgtgctatcaggtgctcacatcttttgcgtctggacgagctacatctttggtggttgacaggtgatcattttcttcgcttcattccactaagaagatacttttttctcttatgaaacaatagtccgctttgcccatgttagattggtgaatgcatctttttatgctgcctgcttccattggttcctcctctttattcaatatagaatatacaaactatatttttgcttcattagtcagacacagttgcataggtactattagtccatcattcactccatgggaataaaatgatttgagaaactgaaagttgatgctcttgcccttgttttgtgacaagattctataccgttctatgcccttaccatgattgtcatattggtttaacgtgctagagcatgattgagttaatctgtgcttttgagcttttaggtgtagccatctctgttattttataattttggactgtctcaatttttaactctgccatgtgtttttgggatcacttctcgccttagcagccatttagcccatttaaacggtacacgtaggccagccatgcttgttaaccagcagtctagcctgtttagccatctaaataaggtggccaactatttgacgtttttggttgacaattgtttgggactctgttggtgtaacaaataacaatattatcactggttcagtttgttttattcccgatggcttttgggacctcttcatgagaaacatagctggaatatgataatatggctagttttggtgcagtggtggtgggtctactgtggtttctgctgtacacgatggttttgttttacagaaggtatgctttacttttcatgtgacaagctgataactatctgtaagaacaaaatgtatgatgcaatactttatgtgtctagttattatttcttttgctttttttcagtcatttgaaaaatgtgaaaaactaattcaccgtcaatcttaaattcttttctgatacatacacaaacacaatttgtgattgcagtctgtgtcgacttctccagttggcggtgaatttttaactgactgtatgatgaaaagcttggagagcaagggcatcgtcgtaagcttctcccttgcaacctttcctgtcattttatagaaaatagttttcctgcccgttcactcatttttgttcaatgtccagattaggcccagatattcatttaagaagaaggaaatcagtcctggagaatataaggtgctatttctttgtaaaatatgtttgatatttaaatcttttgtctgatttcttccaagccaagggaaaactcaccatataactgaattgtacccctttcaaaatggcacacccagtgtaggaggctctcacgtgagtgggttgtggggaagggataaaccgaggcaagccttctccccgcaaaagcggagaggctgctttgttcctgtgacctggtgactcattgagatatttctcaccactgcaccaggcctgcttttctgaattgtacccttttattgatacataatattgctttgtcacatgtaagctgatctgctaacatgcttgaaatacttcagaaagacttcaggggcttgcactttgttttttttctggtgtgtgttatatggcactgctgggcttgtattgtattttgttcttaatataatgacaggtcggtctcctgctggttcgagaaaaaaagggaaaatttatgaacttgttttcataactagagatacaagtaatgcaaaaatgagagagccagaagcaaacaaagttttttattttttcgacttcattagcagctcaatttaggtattattcaaattatatggttcagaaaaatcagccttgaattcattcactcgggaacttgtttcgtacctggtaaccagtaactactatgtcagcaaatccaagtaaaagcgttactttgaagtctgggtagacccttttttcttctctgggatatcgcttaaattgtgctgtagtttttttttgcatttgggggcaattacaaattctgcggtgattttcttactgctcgttgcattctgagggtcttaatctgttaatatattatttgtgattattttttcccaccatggacgaaccaaatttcattactcgagcaacgaaattacattagtttgtaaaaccaaaagaaaaacacatcaaatgtaaagaaaatcctagctggaatgaacacaggttcacccagctggtgcaaaacaaccaacatattcaacaagtgttttaaccagtttacaaacgccaccagccaaacagaaacgtccaatctactatttattacaggaccagttctatgctaatgtattatgtcttgttcatttggctgctgtatttgcttatcgttgcccctgtactacaaaaatgtttgcactatacctctttgcaacactcagtgctatcctgtaatgcttttgggattacagccaaacatgtacttttaatgtgagttaatgtttgtccttgtttcagattgtagatcttgatcttccaaacacaactgagagttacaggttgtactgcatggtatgctcgtttacaaagctttagtttttgctgtacgctgttgaaactttttttatggtttcaatgatgatctgttgtattacagagagctattgctagtgacgtcaaggagtctgtttgcagagttccagacactgcttttgatggtatacttttgttgtaactgtaatatttgtgtagcaattatcttgtgttgtttctattataaattcaatattactttgacttcttttgtgtgtaccttgaatgcaacataaactatatttgcttcattggcttacggtttttaaatctttttctttacatttcatgttattttatagcatttaatttcccagctctatttttcatgcagaagtggcatatgcaaatgttcctacaacttcatatgagcttcctgatggacagtaagttggactttaactatgagtacctattttttgttatttaatccatccctgtcaagaatatctgtcacttcatcttgtacgcttattcatcacacctaaactattggtgcatctgtgcacgcatctctgtctggcataaaaatggatcatgaggaactcaacttgataattttgataaaaaactagtttatcatgctacaaaataaatttatctcaacatctgatgtattggggtacgagactgaggatcaatatgacaagttctgtttactggtatttgttagccttatctgtcataatacatggaacatttgcaaattggtaggctgatctgacatttgcaaatttatatcaagcatgttgcaattggtagatcatctcataatcttctgttccttttttctttggcatgttctgtttatgggattcttaacttacctgatatttgtgcagaactattgaagttggtgctgatagattcaaggttcctgatattctatttaatccatctctatcccaggtgagtagcgtggaaaagggtctgtagtacttattggtttgaatgatttgtaggttgtaatcacctaacttgttctggtgctgtttttttactacaccgttttttgtattggatcatgttattgtgcgaaaaagccttatggcttgtttggttgcgtctggatcgaaggggattggagggggattaaatccatccctagtcaaaattgaattgaaggggatttaatcccccttaatacccttcgatccagatgcagccgaacaaggccttagtgggtttctttgttgtttagtgcatgttagcagtggtttagagaatttggtggatgctagcagtggtttagataattgtttgaactcagcagacctgctttatctcaccttatatcttggccttcattcacacaaattttatgaccaacagactattcctgggattgatggatttgcagattcaataccagtccgtggccttcaacgaatggtgagttgaacgaagcctatactttgttctgcattgcaggcagcatgttagttcttcatatatagctaaatttgctgattctttgtttctgtccaggtcattgatagcgtaaataagtgcgacgttgacatacgaaaagagctattcagtaacatcttggtaaatacatgaattccagcatgtgcaagtggcgttagtctcttgtacagaatccttttgctatgttattgtaacatctgcaaacttttattttgtgtagctctctggtgggtcatcatcaattctgcagttaaaggagcgcctggagaaagaagtattggaggtacaattttttttagctctttaaccactagtacgtacttgtaatatctaggtatgtattgaactgaaactagccctgtttgtttcggcttctggcagtttctggccaccaaaagctgctgcggactgccaaacgctcagcttttcagccagcttctataaaattcgttgggccaaaaaccattcaaaatcaacataaacacataatcggttgagtcgttgtaatagtaggaatccatcactttctagatcctgagccctatgaacaactttattttcctacacatgtaatcgtaatgatactcagattctccccacagtcagattgttatgtatggccaagcctatgttaggcgcaatagggccaaggctgcccaggtggggcccaaggcccaatagctaatagataagctctatctagttagttatacttatccaaagatagtagataaagatcagctctatccagatagttatacttatccaaagttagtagatagacttgagatagctctatatatagatctgtaaactctggaataaagacaagcagaattccaatctattctggcttcccagagggagccaaagtctcctgtgatcttctccccgcgcacaacccagccaggatcacgacggcgccccagcgccgccaccctggtcccaccaaatcccctccctacaatctgcgcaatctgcccagtagaattcgtagctctaccaatctggtatcagagcactcgacgatcatgagttcctccaagtcgccgtcaccgggacagcagccgccgccggcctcaagcccacccgcagcgccggtcgtctccctggccgcggtccctgcgtcgtcggaggccatggcgctcggccctcccggcgcggccatcaaccagcaggccgctcccgcgctcacaccggcccagatcgcggcgtccttggcggatctcagccacgccgtgcgcgatatgcagatcaccatgaacgccatgctgacaggccacctccccttccccaatccacaagccgccaatccaccccagccgccgcacccgtccctgacagcgcagccaccgccagccgcactgcccccacccacgcagccacctgcgccactccctccactcgcccggcaaccaatttcttactagtacggcatgccgatcgaccccgggccttcatccaccgcatcaccgaccacagcccccatccatatgatccgcttcccaccatccccatcccccatcccatcttgggcgcagggcgcgcctacggtttcaccaccagtgtactctgaggcactcccgcgaccggcgctcacgacttccttacccagcagcaccgtcggtgggcctcccgggatgctgttaggaggcggcgacggccccctgttcccaggtcgggggcccttgcgcccccacgtacccgcagcgacaacagcgtggtcaccgtaccacgggctacctcaggacgacgacgtggagaccacagcctacgggggcgctgaggcgcgcgcgcctccacgctactacaaactggattttgccacatacgatggctccgaggatccgctgaactggctaaatcattgcgagcagttcttccaggggcagcgcacgccagcctcggatcgcacgtggctggcctcgtaccatcttaaggggccagcacagacgtggtactatgccctggaacaggacgagggcatgccgtcttgggatcgcttcgccgagttgtgtcgccttcgcttcggtccagcagtgcgcggttctcgccttgcggaactgggacgcctccccttcctgtccacggtctaggagtactcggaccgcttccaggcgttgctgtgtcgagctcgggacgtctcccccatgcagaagacggagctattcgtgggcggccttcccgagtacttgcgggtggacgttgagctgcgcgacccgcaggatctacaaactgccatgtacctggcacgggcgttcgaatggcgcgcggcggcctggcccccattccagcagcgcgggtcgcgaccaccgcaacgggcgcagggctcgggtcgcgtgacaccagcaccgcccggggctctaccgaccggtacgacgacaccaggcgatagtacgactccgacacgcccgtttcgccgattgtccccgggcgagcagcaggagcggcgccggcaggggctctgcttcaactgcgatgaaccctacgttcggggacacgtctgccagcggctgttctacttggaggtcgacgacttcctcgacgaggcgtccggtgagggtggggtcgacccccttgaggagtcggccgccccagacgtcacgggagccaacgcgttggtggtctcgttacacgcgctggcgggcatccggacggacaagacgctgctgctaccagtcaccatcaacggcgagcgactactcgcgctcatggacacagggtcaacccacagcttcctcaacgctgacacaatgagccgcctcgggttagccatggcgggtggcgagcaccttcgagtcacggtggccaacggtgaccgcctaccctgcgccggcatcgcccgcgacgtccccatcatcatcaacgacgagtccttctccatcacgtgcgttgggatgcgcctgggctgctttgacttcatcctcggcgtggacttcctggagacgctgggcaccatccagtggaacttccgagcactgaccctgtcgttccagcgccagggccggcgcatccactggcaaggtgtgcgggccacgcaacagcctgccccgcagcagctggctgtggcagtcgtcgacactgcccaacagcccctcatggacgtccttctgcagcaacatggcgccatcttcgacgagcccacgggactgcccccggcccgcccctacgaccatcgcatccacctgctgcccggtacaactctggtggccgtacgaccgtaccggtacgcacagctgcagaaggacgagctggagcgacagtgtgaggccatgctcacacaaggcatcatacgacccagcacgtcgccgttctccgctccggtgctcttggttcgcaaggcggaccgctcgtggcgtttctgcatcgactaccgcgccctcaacgccaagacgtccaaggacaagttcccgatcccggtggtggacgagctcctcgacgagctccatggagcccgtttcttctccaagctggacctacgctctggctaccaccaggtgcggatgcacaccgatgacatcgccaagacggcgttccgcacccatcatggccactatgagttcctggtcatgccgttcggcctctcgaacgcgcctgctacgttccaggccctgatgaacgacgtactccgcccatatcttcggaagtttgtgcttgtcttcttcgacgatatcctgatctacaatgcatcatgggcggagcacctccagcatgtgggcatcgtcctcaagacattgcaggcaaaccacctccacctgaagcgctccaagtgttccttcggcgccacatcagtggcctatctgggccatgtcatctccgagggcggggtcgccatggatgccgacaaggtcacggcagtggcctcctggccgcccccgcggtctgcacgaggcctccggggcttcttgggactagcagggtactaccggaagttcatcaaagacttcggcctcatcgcagccctgctgacacgtctcttgcgacgagacgcgtttgcctgggacgatgacgcgacaacagccttccacgccctaaagcacgccctaacgacgggtccagtgctccagatgccagacttcgccaagctcttcgtcgtcgactgtgacgcgtcaggtgcagggttcggtgctgtccttcatcagggcgcgggacctctcgcctacttcagcaagccatttgcagcccgccaccttaagttggcggcctacgagagggagctcatcggcctcgtgcaggccgtccgtcactggcgcccgtacttgtgggggcgccacttttctgttcggactgaccactacagtctcaaattcttgctggatcagcgcttgtccacagttcctcagcatcagtggaccagcaagttgttcggtttcgatttctcggtggaatacaggccggggcgcctgaacaccgtggccgacgccctgtcccgccgcgactcggaggctgccgtggaggacacggctatggcagcactggccatctcgggtccaacattctccctgctggacgacatcaggcgggcgctggcagctgcacctgatgggcagcacctcctccagcagctgcgggacggcgtattggctgcgccatggcgcctcgtcgacgggctgctcctgcacggcacacgcatcttcgtgccgaactacgacgacctgcgccaccaggtgctgacactggcgcactcggcaggtcatgagggcatccagaaaaccctccatcgattacgggcagacttctacatgccacatgatcgcgcgctcgtccaggactgggtgcgcacctgcaccacgtgccagcaaaacaagacactggcgcagcagccgggcggcctcctgcaaccccttgaggtgccgtcccaggtgtgggccgacatctccatggacttcatcgaggggctgcccaaggtggcaggcaagtccgtcatcctcacggtggtggatcgcttctccaaatacgcccacttcatcgccctcggccacccctacaccgcgtcgtccgtagcacgggcattcttcgacggcatcgtacgactgcacgggttcccgttgtctattgtcagtgaccgggaccccgtcttcaccgggcacgtgtggcgcgacctcttcaggatggcaggggtgacactaaagatgagcaccgccttccacccacagacggatggacaatcggaggtggtcaacaaaattattgcgatgtatcttcggtgtgtcaccggcgatcgaccgcgggcatgggtggattggctgtcctgggcggagtattgctataatacctcctaccacacagcattgcgtgccactcccttcgaggtggtctatggcagatccccaccgtccatgctaccttacacgccagggacggcacatactgaggccgcagacgacatgctacgctccagagatgagatgctggccgaggtgcgccagcgccttttgcaggcccagcagctcgccaagaagtattacgatgccgggcatcgggaggtccagttccaggtgggcgactgggtgtggctacgcctgctacaccgcacctttcagtccctccatccgcgcgcgaagggaaagctgggacctcgctacgcaggccctttccgtgtccaggaaaggattgggtcggtagcctaccgcctgcagttgccagatggtgctcgcatccatgatgtcttccacgtcagcctgctgaagccgcatcgtggggatcctcctgcaactccggggacgcttgacccagtgatggatggtcggctgcttcctgtgccggtcaaggtgcttcgcgctcaacttaggcggggcgtgtggcaggttctcgtacagtggcgtggactggctgaagatgacgccacatgggaaaagcttgaagagttccgtgctgcttaccccaacttacagctcgaggacgagctgtttgagaaggcggggagagatgttatgtatggccaagcctatgttaggcgcaatagggccaaggctgcccaggtggggcccaaggcccaatagctaatagataagctctatctagttagttatacttatccaaagatagtagataaagatcagctctatccagatagttatacttatccaaagttagtagatagacttgagatagctctatatatagatctgtaaactctggaataaagacaagcagaattccaatctattctggcttcccagagggagccagagtctcctgtgatcttctccctgcgcacaacccagccaggatcacgacggcgccccagcgccgccaccctggtcccaccaaatcccctccctacaatctgcgcaatctgcccggtagaatccgtagctctaccatgatggaataagtcatgtggtcagcagcagttgcagttttgactgctgcaggacagcagtagcagcagtcttttgactgcgcagcagcagcaaccttttgactgctgcaggacagcagcagttacagcaggacagcatgcagctgcagttttttgactgcgcaggacagcagtagcagcacagcagttttgactgcactttagtatctaaaggacagcacctgtgtgctgcagcgtgtagtgtagtgtgtagtgcagtgtagtgcagcccctagggctataaatatgtgtccccaacccctctaagggtatggcattgtgtagtgtttgaagaaataaacagaaaattgccccaactcatagtgtcatcctctgatgagagttagagtccctctacttacaattggtatcagagccaaactatcctgcagcctaaacatctcgtgctcatctccttcccgtgcctctccccacactcagtcggtagcaagagctccaactgttccttcctcccctgctcagacgagcagcctttcgtctgagacagcctcttccacacgcagcgacccctcactagcccaccatgtccctacgctcggccacttcgagtgcgcggcgccagcaggaggccgaggtcgccgcggcacaagaacgcgagcgagcagcagcagcggctgcagcgacagcggcgagggcagcacggttggcggcggcggaactggcagcggcgagagcggaagtagaagcagcggaggcggcggatgctgcacgtgcggcggcaacagagctcgaggttctgcgcggcagtagagctggcagctctgcttctgtcgacgacaacaccgacgacgagctcaggctggcgagggaagcagcgcgagagcaggcggcacagtgggcagccgcgcatccccatgggggcgcgcgtggcggcagcccggataggcgccgacacgctgacggcgctccaggcgggggcgcacgcggcggcagcccagacgggcgtagacgcgccggcggtgctcccggcggcggcgaccgagtcgacggagatcgcggcctctacaggcggcgcggttctccctccccggatcggtaccatggtcgccgcatggcccaggccattgtcagggacatcggtcccggcggtgggtggcctaccctcaccaagaccaactacgtcgagtgggccgcggtgatgagggtacggctccaggttcgccacatgtgggaagcagttcgttacgacgacgtcgactaccacgaggatcggcgggcgctggatgccctcattgctgcagtcccgcccgagatgcagttttcgctttcccagaagcggactgccaaggaggcctgggacgccatcgctgcgacccgcatcggcagcgatcgtgcccgcaagaccacactgcaggcacttcgcaaggagtgggagaacctggccttcaagccaggtgaggatgttgatgactttgctctccgcctcaacactctgttgcagaagatggtgcagttcggcgatgacacctacgatgaggagagagctgttgagaagctcttccgttgcatccccgagaagtacaggcagattgctcgctcgatcgagtctctgctagacctctccacgatgacgatcgaagaggcgattggtcgcctcaaggtggtcgacgacgacgaaccacatgctctctctgggcctatcactatcggcgggaagctacatctcactcgggagcagtgggaggcctgccagggtgacaagaagaagggggagtcctcctcctcgacacgaggccgcaaacgcggcaagccgcgcaagccgcgtggaggcgcccaggccggggcgcgaggacatgctgagggtggtgcacgtggaggtgcccaaggcggcgccgtcggcaacaagaagccggcacgagacgacggctgccacaactgcggcaagcttggccattgggccagggattgtcggcagccacgacgtggccaggccaacgtcgcacaggcggaggcggaggaggaggccctgctcctggcacatgcaagcatcgagccatctccagcggcaccggccgcagcggcactcctccaccttgatgagtcgaaagcacgcgctttcctcggcgacggctccaacaaggacatgatcgaaggatggtgcctcgacaccggcgccactcatcacatgaccggccgacgggagttcttcaccgagcttgactctagcgtccgaggctccgtcaagtttggggacgcctccggcgtagagatcaagggcgccggctcagtcgtcttcaccgccgcgtctggtgagcacaggctgctcaccggagtctactacatccccgcgttgaggaactctatcatcagcttgggacagctggatgagaacggttcgcgcgtggaggttgagcacggagtcatgaggatctgggatccctctcgtcgccttcttgccaaggtacgcaggagtgcaaatcggctttacatcctcaatgtgaaggtggcacaaccttgctgccttgctgctcgtcgagacgacggggcatggcagtggcacgagcgcttcgggcaccttaacttcgaggccctgaagcggctcagtgccaaggagatggtacgaggcctgccgtgccttgaccatgtggagcaattctgcgatgtctgcgtgttgacaaagcagagacgactcccctttccccagcagtcgagcttccgagccaaggagaggctcgagctcgtgcatggggacttgtgtggcccggtgacaccagccacaccaggaggacgacgctacttcttgctgctcgtcgacgatctctcccgctacatgtgggtgatgatccttggcagcaagggagaggctgcgaacgccatcaggcgtgtgcaggtcgctgcggaggcggagtgcggccgcaagctgcgcgtgctgcgcaccgacaacggcggcgaattcacggcggctgagttcgcgtcgtactgcgcggatgagggcgttcaacgccactactccgcgccgtacagcccgcagcagaacggcgtcgtcgagcggcgcaaccagacggttgtggggatggctcgggctctcctcaagcagagaggaatgccagctgtcttctggggagaggcggtggtgacagcggtttacatcctcaaccgctcgcccaccaaggctctcaacgggatgacaccgtacgaggcttggcatgggcgcaagccggcggtctctcacctacgggtcttcggctgcctcgcgttcaccaaggagcttggccacatcagcaagctcgacgataggagcaccccgggggtgttcattggctacgcggagggctcgaaggcctaccgcatccttgacccaagaacacagcgtgtgcgcacggcgcgcgacgtagtgttcgacgaagggcgaggatgggcgtgggacaaggcggtggacgacggcacgactccgacgtacgacttcaccatcgagtacgtccactttgagggagctgggggagtaggcaactcttctccgagcaggtctaccccagcccccaagtctccaccgactccagcgccacactctccagctcctgctacaacgagctcttcaccaccacgcactccagccacgactccggctacagcgagctcttcgccaccacgtactccagcaccggcggtaccctctccgggaacgtcctctccgacaccagctcgtgtcgagcacgacccagtggagctcgtgacccctctgtcccgcgacgaggagcgcgtcgacgcgtgctacgacggcgagccgttgcggtatcgaagggtggagggccttctcatcgacccatcggtgccaggccctgcatctcgcattctggcaggagagttgcatcttgcatgcgacgatggtgagcctcggtctttcgcggaggccgagaaacatgcggcttggcgtgccgcgatgcagtcggagatggacgcggttgagacgaaccgcacttgggagctcgctgatctccctcatggtcatcgcgcgatcacccttaagtgggtgttcaaactgaagagggatgaagccggcgccatcgtcaagcataaggctcgcttggtggcacgcggtttcttgcagcaggaggggatcgacttcgacgatgccttcgcccctgtagcacggatggaatccgtgcgactcctcgcgttggcagccctgaagggctggcatgttcatcacatggatgtcaagtcggcgtttcttaacggcgacttaaaggaggaggtctacgtacaccagccgccaggttttgcgatccctggcaaggagggcaaggtgttgcgtctgcgcaaggctctctacggcttgcgacaggcaccaagggcgtggaatgccaagctggattccacgctcaagaggatgggcttcatgccaagcccgcacgaggcggccatctatcggcggggcaatggaggaagtgccctgctggtgggtgtctacgtcgacgacttggtgatcaccggcgccaaggatgcagaggtggcagcgttcaaggaagagatgaaggccaccttccaaatgagtgacctggggcatctctccttctatctggggattgaggtgcaccagggagactccgggatcacacttcgccagaccgcctacgccaagcgcattgttgagctggctgggctcaccgactgcaacccagccctcactccgatggaggagaggctgaagctgagtcgcgacagcacgacggaggaggtggatgctacacagtaccggcgtcttgtggggagccttcgctacctcgtccacacacggcctgacttggcatactccgtcggctacgttagtcggtttctgcagcgaccgacgacggagcatgagcaggctgtgaagaggatcatccgctatgttgcggggactctcgaccacggtctctactacccgaggtgccctggggaggcacaccttgtcgggtacagcgatagcgaccacgccggcgacatcgacaccagcaagagcacaagcgggatcctcttcttcctcggcaagtgccccatcagctggcagtcagtcaagcagcaggtggtggccatgtccagctgcgaggccgagtacatagcggcgtccactgcttcgactcaggcgctctggctggctcgcctgctcggtgatctcctcgggagagacactggagcggtggaactcagggtggacagccagtccgctctggcattggccaagaaccccgtgttccatgaacggagcaagcacatccggctgagatatcacttcatccgagactgcttggcagaagggagcgtcaaggcgcgttacatcaacaccaaggatcagcttgcagacctgctcaccaagccccttgggaagatcaagtttgttgagctttgctccaggtccgggatggcccaactttcccacaagacgacgcacaagacttagggggagaatgatggaataagtcatgtggtcagcagcagttgcagttttgactgctgcaggacagcagtagcagcagtcttttgactgcgcagcagcagcaaccttttgactgctgcaggacagcagcagttacagcaggacagcatgcagctgcagttttttgactgcgcaggacagcagtagcagcacagcagttttgactgcactttagtatctaaaggacagcacctgtgtgctgcagcgtgtagtgtagtgtgtagtgcagtgtagtgcagcccctagggctataaatatgtgtccccaacccctctaagggtatgacattgtgtagtgtttgaagaaataaacagaaaattgccccaactcatagtgtcatcctctgatgagagttagagtccctctacttacataccacagattcttcccacagccagattttcagaaaagctggtcagaaaaaagctgaaccaaacaggccataaaaggtgctttaaaattctcatttcaatataatttaataattcccactatgaaactattacaaatgaaatggtgggagtattttagattgttttgtacatattttccgtattttgcgaccttagttgatattgataactatgaaacaattctctttgttcatgttggttagaaatggtgaagtcgctctttactcatttttaatgctagctattattaccacattgaattattacaggagtctcctcaagctgctcgtgtcaaggttatggcaagcggaaactcagtagagagacgtttcaggtcagactagaatatttatttattaggttattgctggcacttacaaatgacatggctgaattgttggagaattgacatgcagtgtttggattggagggagcattctagcatctcttgggtcgttccagcagatgtggttctccaaagcagagtaagctcgatatttgataggccctctgttttttctatacttgccctggacacctgatgaggcgtgccatgtgtctcgcgccaggtatgaagagcatggggtttcctatattcagagaaagtgcccttgaagcaggggaaggaatatgtacaaccaatattatgctttacgagccttattgttgccaaagggttccttgtgtacaacagcctggtgccttgccatgttggccaatgaatactcgagactcttttcaagtgacgtttgttgtcttcatggctagttaattttaggtgatgtaaggtgaacgtaagaactaggtcaactaaaatatttatcattgacagtatgctgaatctgtctccccttctgtagaatgagacgggaccccatcttgttctgtaccggggctaattctttgccagcacacaaagagccaagacgattgttgtaactcgggtt

SEQ ID NO: 157 - DNA, 4418 bp, Zea mays
  source 1..4418: mol_type = genomic DNA
aacacacactcgacgcaatgcaacgcagcgcagcgttgtcacaatgtcacgccaggacaaatccagcgctccctgaagcagagaaagaccgcgaccaaaagcaagttcgatctccgctcctccagtctccaccgcccgccaaccccgagatatacctcccttcctctcgaagcttcgtctccagagtccagacgacgtcgccggctcttcactcggcgctggtgctggtggttgccagtggcggtggctgggtggccgggtggcggtgttgctgggatgcccgccgcgacggcgaccgccgcccgcctccgactgccgctgccaaaagcagcccaccgctcgccctgctcgagccggcgcctctccaattgccaccgccactgacgagcgaccacacgcttggcgcccgccatggacgccttgtcccgccccgctgttgtcatcgacaacggcaccgggtacgacctccctccctctccctagatctgcgcgcgaaggcgcgacgacggtgagtcacgctgctgatctgctcctactctcgctcgcggcaggtacacgaagatggggttcgcggggaacgtggagccctgcttcatcacccccactgtcgtcgccgtcaacgattccttttccggttcaggccagccggcggcgaggggcgcccctgccagggggaactggctcgctcagcacagtgccggcgtcatggctgacctcgacttctacatcggccaggaggcgctggcccgatcccgcgccagcagctcgcacagcttgagctatcccatccgcaacggccaggtgggcgctccagctgtgtactgccgtgtgccgtgtccagttgctgctgttttttcacgaccttacttacgattgaattaggctgaaatgaactctttcaggtggaaaattgggattctatggagaggttttggcaacagtgcatcttcaattacctccggtgcgacccagaagatcattattttcttctaactgagagccctctgactgcccctgagatccgggagtataccggggagatcatgttcgagacgttcaatgtgcccggcctctatattgctgtccaacctgtccttgctctagctgctgggtacactacaaccaaggttagtcagcatagcttagccttgttgtttctttagcataggcatgccttacgctaaaatgaatggcaatagcatcgagcaggccatgttttagtgtacttgaaaaatgcttcatcgctgtttttctttcttccctgttgagcgatcatcacactcttacatttatgagaaacttcatgctttgttttcagtgtgaaatgacaggtgttgtagttgatgtgggtgatggggctacccacatcgttccagttgctgatggttatgtcattgggagcagtatcagatctattccaattacaggcaaggatgttacccaatttattcatcaacttctaaaggtagctcctttgctttcttgctgattgtcacaagataatactgaactctcaatttctctagagtagcttatcactttatcagatgtaaagagaaaaaaagggcgtactcagtgccgtaggcttcccgcactgtgcggggtctggggaagggtatctttaagcgccaagccttacccgcataatatgcagaggctagggctcgaacccgggaccttccggttacagacggtaggctctaccgctgcaccaggccggtagaaaacagtactttgttcaacagagaatggaacataatagaattatgaaattgttgttaatttggaaatgtggctatcatactggtatgttccttgcgtaataatatatcaaacaacaagcttcacttaaacttcgttcgagaaaaagcttcaccttaacatgttaaggatagccacagcaagcaataaaaccatagctgctctttttaaaaaaatcatagatctgttgggctatcacttgaactttgcctatgatgtgatttttgtgaatatcttctagattctttgattcacctaccgttgttttctaataaagattgtaacaatgtctttcagagtaaatggacacctatgtaagattaaaactattttccattggcatgcaacttacttggtgaattgatttatagtttaactttgacatagatacaaagcatccacctctttttcttacatagtttgataaagtcaccgagtcttgtattcttgcatccaggaaagaggtgagaacattccaccagaagaatcttttgatgtagcaaggaggatcaaagaaatgtactgttatacttcttcagacgttgtgaaggtatttaatgatattgagtgccttgttatgttacttggtgaacatatatactttgatttagaacaatattatttaaaaaaatcaaaaaaatatgagtgaaggttcttttttgctcttcatggcagtacattttgtttaaaagtattgtatagtggcccccctagttgaaccattgaaacactttacacctatactatactgactgagatttgatcgtgtgaatcattgtttgagcaataaacatgatttttgctagataacgccataattttttgtttcatattttccactggtgaatgttctccttttaatatgatcactcctgccagcttctagccatggagtttttgatagaagtaatggtccttccaaaaggacaattagtcacaatctactttattgttgctatttcaggaattcaataaacatgacagggaaccatcaaagtatgttaaacactggacgggcatcaaaccaaaaactggtgcgaaatacacatgtgacattggatacgagcggttcctggggcctgaggtatttgattttactaaatgagtgtacgcatatgtagtaacttctatgtcaccgtctgtttcggacttgcagtaattggttgtaggtagaccatgacatgcagaactacttccctcttgttaatctgagttcactttacttaatgtgtactgagctgtgttcgtagaatgactagtttgtcactttaagttaaaatttcatatcatgaatgtgactgcaattctaactgttctttgaagtgccctgagatatttttgctatgtattttaatatcaccattatatttaaattcaaccttctcacattagtgttaaatttgtgcagatcttcttcaacccagagatgtataacaatgacttcaccactcccttgcaagttgttatcgacaggtgcatccaatcatccccaattgacacaaggagggctctttataaggttttgttgatctgtgtattgttgttactatttattctaagacatcgcatcgagtgtaaagaatttccaatggcacagaatattgtcttgtctggaggctcgactatgtttaaagatttccataggaggttacagcgggacctcaaaaagatagtggatgcacgggtccgtgcatctaatagtcggcttcttagtggagatgctaaggtacaaacattgttatttgctcttaatgtcttcctgacggcaaaaatgcagacaaccaactggaaacttcgctgtggttttgccagtttttcagtgacaacatcatatatgattttcaggcccagcctatagaagtgaatgtggtcagtcatcctattcagagatatgcggtatggtttggtggatctgtgcttgcttcaactgccgaattctacgaggtatatataaaatagcattacaaattttctggggaagaaccggacaacatctgaaatttctgatcgtgaacttatcagcttgcaccattttttttgcactatacctttttcgttcaatctatgcgttagaacttaatataagagtttctgtgcccaggcttgccgcacaaaagcagagtatgaagagtacggtgcgagcatctgccgatcgaaccctgttttcaaagggatgtactgactcagcctatcatagtcctgttctcaagggtatatatgtatttaaaccgagatctgttccctgtggctgacgtcgtgaatggcgtccactcaagcgtaaatggggagatctgacagcggaaacggactgccaagagggatcctggagaatcctagccgtaggagctgtacaaaagtaaagtgcaaatataggttcattttttatcatacaatttagatgctggtaggcctgacgggatgggtttgccacctctgctgaactgggtggcattgtaatttgtagcgtcaacattggtgcttgtatacatgtagggatggcgttgggggggggggggggggggggggggggggcggcggttgggtcgtggttccgttaccccaaaccaattctccatcgtgccttgttgggacaggagagaattagggggattaagggtatgtttggtttgctatctaatttgtcacactttgtctaa

SEQ ID NO: 158 - DNA, 24960 bp, Zea mays
  source 1..24960: mol_type = genomic DNA
aacccaggcacgcggcacagcaggcaggcaggaacccacttcacacctgggtggctgggtctggctggttccttccttcccgcttccctcgtcaaccaaatcaactcgtgaggtctcctccccatcgccacacccacgcgccgcgcaccgcccgcccgctcgccccgcctccgatccctaatcaatcggcctgaccctagcccgccgccggccgcccacgcccgcccgcctcggctcgtctcaaatcgggcgccccaggggagcgaggcctcgatcgcggcggaccccgatgctccgcattccggcccctccggcgacgtcggcggcagcggaggcatgatccggtggggactcggcggacctgccagccatggacgccaccgcacgcccggccatcgtcatcgacaacggcacagggtaaccccgatccctccccctctcttcctcagcatttcgctggcgccactactgcttttatcgccgcgcgatccccccgtatgctcggtggttctcgccgggctttcggccatgcgcgcgcggttggctcctgaaatgggtgcccgtgccaggggatggggcccgtggcttggtttgtggtcggacattctcgttgtacagtttggaggcactggttaggttaggacaactccatgtggaagtctggatcgtcggctgagattgggagacagtacccaatccaagctgcctgttctgctctttttggttgtgctgtcgtgcagtcgggataaatccgtgcaggtgcagtgtaaggggaagagttagggattgctttgtaatgtggagactggagagaggtcagagaacctttattttagtctggactgctactcagtttctctccaagtaaaatgtgaaactctctctctgtcctgcttctgctgtactttatggtgcatatctatcttcaacgcagattccacggtgactttttattttcttttttactctcaagataaggcataagtattcaatgctgggtctattcacatcttgggggtttgtttcagttttttttccagcttttggccgtcagaagatctgccgaacgtctagcttttcagcccgcttctatgaaaaccgctttggtgaaaaccacctaaaatcgatgtgaacacataatcagatgagtcgtcatgatagtaggaatccgtcactttatagatcctaaaccctatgaaccctttcatctttttccgcacgtaaccttcacgatagtcggattctccccacagccagattctcagaaaagttcgtcagaaaaaaactgaaccaaacacccccatcattgtcatgtgatcatgtcaagattccacatttttctatgagcaacttacaaagtcgaacagatcctaaagtaatagctgccacacaatgggtcttcttataggatataaacagtttccattgatctgaattgctttgatttctctgcttctagtttgttttcctgatagcatgacttacagctttcccccctactatgagtttgtgactatgaccattttttcttcttacaatattttatactcttatgtttaggtatagcaaacttggattttctgggaactcggagccgtctttcactctccccactgtagtagctgcgaatgaatcttttctagaccagacagagctgttgagtagtgcaaactggatagcacagtataatgcaggcatcatggctgatcttgacttttttattggagatgaggctttatcgcggcttaggtctagtgggctgtacactttaagaaggccaatccgtcatggtcaggtagtatatacattttcttttagtgatgttgtccttcatttgtgttctaccttcatatgccttactgttttgcaggttcatgactgggatacaatggagagattttggcagcaatgtattttcaattatctacgttgcaatcccgaagagcattatttccttcttacagatagtcctgtcagtacacctgaaagtcgtgaatgtacaggagaaataatgttcgaaaccttcaatgtccctggactatatatttccgttcaatctgttctcagcctttctgctggatatgcctatctgaaaagtatttctgatgacgattcagatactgtggtaggttctgaaacacttccttttgtgctttgtttaccaagtacttattactgcataaaccacatcttcttgattggcattgcttttattgattttttttaaaggaaaatgtaaagttattgtagtgatctcatgccctcacaaagattggccacccctttacattatatatgtttctttgaaccatgatgtgtcttaaaaaggtcagcatcataatttacatataatctgttgcttgtcaaattctggaactcattattgagggcaagcatttgtagttactggcaatcagccaatcactgtttattgttccaatatcttgaccctttttcatttaatacctatgaattatgtggtagagcatatagcttctcattaactttggccaatatactttgtcagtctgatatgacaggggtagtagttgatattggggatggagctccacaaattgtgccagttgtaaatggctatgtaatcgggagtagcataaagtcttttcctttctccggaagtgatgtaacccagtttgtttcacagcttttacaggtacaccatgctctccaatttttgttgtgattaccttcagatgcaaaatttctcatattgttcataaatagggctgtatctattgttggaatgtgtgcccataccctaatcaggggttgggagtgatattaaatagagagagtaactgggccaaggcccattatacaggggtataacagtcattacacagggaataacacaaaccctagacgggtagtctaacacccccccgcagtcacaactctatcctgtacagatgttgaggctggatcggtagtctaaaaagacactcgacggtaaccccttggtgaagatgtcggcgaactgaagcgtggtggggacgctgagaacgtggacgtcaccggcagcgacacgctcgcggacgaagtggaggtcgatctccacatgcttcgtgcgctgatgctgcacggggttggtggagaggtagaccgcgctgacgttgtcgcagtagacgagggtggcgcgctggaggggactgtgaagctcgtggaggagctggcgcagccaggaggcctcggccacgccgttggccacggcacggtactcggcctcagcgctggagcgagagacgacgggctgcctcttggcggcccaagagacgaggttggcgcccaggaagaaggcgtagccggaggtggaccggcgcgtgtcgggacagccagcccagtcagcgtcggtgtagaccacgagctccgtcgtcggggatgggcggagtaggaggccgtagtcgagggagccgcggaggtagcgtagaatccgcttgagcgcagtgagatggggctcccgcggagtgtgcatgtgcaggcacacctgctggacggcgtaagcgatgtcgggttggagaacgtgaggtactggagcgcgccggtgaggctccggtaggacgtcgcgtcggcgaccggaggcccgtcgtcctcagagagcttcgcctgagtgtcgacaggcgtggtgcagggcttgcagtcagacatgccagcccgctccaggatgtcgatggcgtactggcgctggtggaggaagagaccctgaggccgacgttcggcggtgacgccgaggaagtggtggaggggccccaggtccttcatcgcaaactcccgctgaagggcgacgatcgtgcggtgaaggaggtcggcggtggatgccgtgagcacaatgtcgtcgacgtagagcaggaggtagacggtgtcgtcgccgcgccggtagatgaacagggacgtgtccgacttggcctcgacgaagccgacagaggccaggtaggaggcgaagcggctgtaccaagcccgtggcgcctgcttgaggccgtacagggatcggttcagccggcaaaccaggtccggacggtcagcgtcgacgaagccggtgggctggctgcagtagacagtctccgtcagagtgccatggaggaaggcattcttgacatcgagctgatggatcgcccagtcgcgggagagggcgagggagaggacggcgcgaacagtggcgaacttgacgacagggctgaaggtctcgtcgtagtccactccggggcgctgggtgaagccccgaaggacccaacgggccttgtagcggtcgagggagccgtctgaggtcagcttgtggcgaaatagccacttgccggtgaccacgttggtgcctggtggacgcggcaccaggtcccaagtgtggttggccaagagggccgcgtactcctcctccatagcgcgacgccagtgtgggtcggcgagggcagtgcgaacggaggagggtaccggggaagcgtcgggtggagtgctggtcgtagcggctgccaggatgagccggtcgacggggcggagaactccagcagcgcgtcgagtcaccatcgggtggacgtgcccggggtcgcgatggatggcgaccgggtggtatacggatgactcggagtgagccaccggaacgtcgggagcggctggaggggccggctcacggcggtgatagacgacggcggggtcggcgaagcgggccgcgctcgtcgatgggcacgcgtcggggggtgccgaggtagtggcgtggccgcggcgatggtagacgagggcggggatggcgaatcgagccggagtcgacggggccgcgcgtggcgcaggcggggtcgacggggccgcgcgtggcgcaggcgggattgacggggccgtgcgtggtgcaggcaggaccgacggggccgcgcgtggcgcaggcggggttgacggggccgcgcgtggcgcaggcggggtcgatggggccgcgcgtggcgcaggcggggtcgacggggccgcgcgaggcgcggaagaggtcgtgggggccgcacgaggagcaggtaacggcgcaagacggggagccgaaggtgggggaggaatcggatcggactcgaggagggagtcaagatcggtgggtggggtggagccagcaaggggaaacacatcttcgtcaaagacgacatgacgagagatgatgatgcggtgggaggtgaggtccagacaccggtaccccttgtggtcaggggagtagccaaggaatagacagcgggtggagcgaggagaaagcttatgtggagcggtagcggaagtgttagggtagcaggcacagccgaacacgcgaaggtggtcataggaaggggctgtgccgtaaagggcgaagtggggggtagggtggtgtaccgccttcgagggaagacggttgaggaggtgggtggcagtatgcagggcctctgcccagtagctggcagggagggacgcctggaagaggagacagcggagcatgttagtggtggtgcggatcatgcgttcggcgcggccgttctgggcagaagtgtaggggcacgagagacgcaactggacgccatgagtgaggaagaaggagcgagagacgttgttatcgaactcgcggccattgtcacactgcagagcacggaccgggcgacgaaactgagtggatacccaggtgaagaagtgtgtgagggtggtgaatgtgtccgacttcaaccgaagcgggaaggtccagagaaaatgggaaaaatcatccaaaatcaccagataatatttataaccagaaagactgagtacaggggaggtccaaaggtcacaatgaaccagatcaaaagcctgctcagcccgagaagaagaagtagtaaatgggagacgagtatgtcggcctaactgacaagcatgacagagaccctcaaaatgtcccctactacatgaaagatcgagactactggtaatcttggtcatgacgtcgggtccaggatggccgagacgtcgatgccatgtggtggaggaggtggtggagaccaaggcaggaggtggagacacgccggcggtggagggctggagcgtgtagagaggccccgagctgtcacagcgggcgagaagggtcctggtgtccagatccttcacagaaaaaccagaggggtcaaactcaatggaacaggagttgtcagtagtgaatcgacgaacagaaagaagattgtgggtgatgtggggagctacgagaacatcgttgaggtaaaacggcccagggagaaccgaggcacctactgaggtgactggcagagtggaaccgtttccaacgacgatcgaggatgggtgagaggggagtgggggatgagagcgagagagcgtgcctgccgtgggggtggtgtggtacgaggcaccggagtcgatcacccagtcggaggggggtggggtcatcgccatggtgctgaaagcagcagcgagggaggtgctgtcccaaccaccagccggcggggaccaaggcgtcgaggtgggggtctgttgggtctatgcttcgtcgccgaaggtcttataaagagaagtgatcctcggatgaagctgttcgtacaagatagccgaaggtgcctcttcgcagagcttcggcattacaaaccgacttaaagatagaatgaccttttagtccataaaggtctgagtcaacgttgtaagttcttataaggggcatacttgtaattcctcacaggctgcgtcctgtgcctataaatagtgaacagtattccgttactgttcacgcattctgatttttgcaatcgcatttctcggaatacaacctttgtcaaggcataggtatcattgtattttatgattcaatacattaagtaaatattatattatgcatctgtgaatcatttatccattcttaccttttttactttgcattattctataacgtttattgaaagtttattacgaaggttcaacttcgtaataagacgcttatcaaccttcgtctaagatccattatcccaaaaggtataatgcttcacggacgaaggacaaaatcatttaacattttatgttgccttgttcttaattcatagcatttgagaacaagtccccaacattggcgcccacctccggtgaactcacttccactttttgagctgatggcttcgttcaacaaccaagctggagttacttcggacccgaagctggtgctcccgatcacaggtggctcgtcctcagagccagctaacaagaagcagaagaaggaagcacagagaagagtacagcatgtcggggtgcaaggacccttcatcaaatcaagatggtctcacattcctattaccttctctcaagaggaccttcagctcaaagattacccacacaacgatgccatggttatctcttgtgttatcaaaggatttctggttcacaatgtcttggtcgatacaggcagtgcagctgacatcatatttgctaaagccttcagacaaatgcaagagccagaagataagattcatgatgctacacatcctctttgtggcttcggaggaagacagattgtagcactgggcaagatcaccatgtcagtcaccttcggattcatcaacaacactagaactgagcaagttgtgtttgacattgttgacatggaatatccttacaatgcaattattggtcgtggtactcttaatgccttcgaagcaatccttcatcctgcctatctttgcatgaagataccttcggatcagggacccattgctatccatggaagtcaagaagctgcaagaagggccgaaggcaattggactgactcaaaagcaatccataacatagatggagctgaagcttgtgaacagtacaagttcaggagggagaaagcagcttcagcagaccagccgaagcctatgctcttatgtgaggacatagcagagcagaaggtgctgttaggatctcagttatccgaagagcaagagaaaaccttgataaggtttttgttcaataacaaggatgtttttgcatggtcagccaatgatctttgtggagttaatagagatgttatcgagcactcgctcaatgttgatccatccttcagacccagaaagcaaaggcttcggaaaatgtcagatgataaggccgaacgtgctcgtaacgaagtcaaaagactcctcagtgcaggagttattagagaggtgaagtacccagaatggctggctaacactgttatggtaaaaaaggccaatggcaagtggcgaatgtgcatcgattttacagatcttaacaaggcttgtccgaaggatgaattccctctaccaaggatagactctttagttgatgcagcagcttcgtcagagctcatgagtctgttagactgctattcaggctatcaccaaatttggatgaagaaggaagatcagccgaagactagcttcatcactccaagtggcacatattgctatcttcggatgcctgaggggctcaaaaacgctggaggaagtttcagccgaatgactgcgaaggttcttcaatctcaaataggcaaaaatgtgctaacctatgttgatgacatcattgtcaaaagcacgaagcaggaaaatcatattgccgatttgcaggagacctttgccagtttcaggcaagctggtttaaagttaaatccagaaaaatgtgtcttcggagtgaagaagggaaaatttcttggatgcttagtttcaacaaagggaattaaagccaatccaagtaaaattgaagctatacttcggatggagccaccaactacaaagaagggggctcaaagattgacaggaagattggcatctctcaatagattcatatctagatcagcagagagaaatttaccattcttcgaagtgctgaagtcggccgaagtctttcaatggggctcaatccagcagaaggctttcgaagaactgaaacagtatttgatagatctaacaacactgactccaccaatgccaggggctcctttattattatatgtggcagcttcgcactcagcggtaagtgcagcgcttgtccaagagaagcttgatggtcaagtcagaaggcaggccccaatatattttgtttccgaagtccttagtttatcaaagaaaaattatacagagttggagaagatactgtatgctgtcttgatggcctccaggaagcttcggcactatttccaagcttacaacataattgttccttcttcgcaacctctgaaggatattatgaggaaccgagaagctactggaaggattggaaaatgggctgcagagctcaatgaattttgtattgaatatgttcatagatcttcgattcagtcacaggcactggcagactttattgctgattggacgccaggggctcaggaggaggaaacaaataaagacaacgaagcctggacagtgttttgtgatggatcttggggaaccttcggagcaggagcggctgctgtgttggtttcaccttccaaagtcaaaacttgttatgcagcaaagcttgattttaattgcacaaacaacattgctgagtacgaagcattgattctaggtcttcgaaagttaaaagcaatgggaatcagaagagccatacttaaaactgattcccaggttgtttcgggtcatgttgacaaaagttgcaaggctaaggatccgaagcttgaaaaatatctggatatggttcgaagagttgaagcttccttcgaagggttttctgtcaaaaatatccctagaggacaaaatgagcatgctgatttgctagctaagtcagcagcacaggggctgcctttaccttcggatgtatttttcgaaacaataaaagcaccttcggtggaacttcttgaaagagcagttcttaatatatctcctgtttttagcgaagattggagaaccgagatcatctcttaccttcagggtaagtttctttcagatgacgaagcttataacaagaggatagaagcaagagctcgcccatatgtcatgatagaaggggagttgtataaacatggagtttgtgctccgctgcttaaatgcttatctagaaccgaaggtatagagttaatgaaagaaatacatgcaggcctgtgtggatctcacattggatctaggccgttactcggaaaaattttccgtcaagggttttattggccgaaggcagcttcagatgcagcagaattggttcaaaagtgcgaaggttgtcagaaatgtgcaagagatcaaaaacaaccttcgtccttgacacagctcatacaacccacttggccattgcaaaggtggggccttgacttgttaggtccgttaccaccagcccaagggaacctgagatatgttgtggtagctgtggaatatttttctaaatggattgaggcgaagcctttagccacaataacttcggctaccatccaaaaatttttctggcagaatattgtttgtcgttttggggtgccaaaggctatcactgtggacaatggaacacagtttgactccgaagctttcagggatttctgtgaccaaattggtacgaagatccatttcgcatcagtcaggcacccggaatcaaatggactcgttgaaagagccaacggcattataatgacaggaataatgaagctaatcttcaatcaacctagaggaaaatggccagatcagctaaccaaagtggtgtggagccacaacacgacaacatcaagatctacaggcttcactccattcaagttgttattcggtgacgaagcaataactccagaagacgctaaagccggatcaataaggatagtagcttcggcagaatcagattccgaagctgcttattctatagaaaaagatgctttagaagggatcagactgcaagccgtggagaatattaataaatatcaagctgaaacagtcaaatggcgggatagaaaggttcggctaaaaaatattgagccagggcacttggtgcttcggagggtggccaacccggaaacagtgggcaaattgcagttgaaatgggacgggcctttcttagtagcatcttcgtcaaggcccggttcatacagattgaaagatatggacggcaatgacattcctagatcttggaatgcggatgagcttcagcgatattatgtataattcgatgtaatttttcatattttttattttttctttcatggcacccttttcctttccaaagggggagaaaggtttttaatggggccagcatatgtaatttccttttctagtcttataagagtaaaatcccccaaagaatgtaaatgtaaaagctgagagcgcaccatcgagtgccaaaaaagtaaaaacgaagaagctccaaagacgttcctaagggaatgcagagcttataccgcctaagtaaaaggcgaagaagctccaaagacgttcctaagggaatgcagagcttacagcgaaaagtcaacgctgattccgccaaaagtaaaggcgaagaagctccaaagacgttcctaagggaatgcagagcttataccgcctaagtaaaaggcgaagaagctccaaagtcgttcctaagggaatgcagagctgaggtgtgaatgtttttaagaaaataatggctatgagtatggcttcggatacgtgtttggtcattcatttgcacatcacattacatcatagcatttgcattcataaacattcatctaggcatatgtaggataatcatcttcatcgcataaaatggttgcttcggcaagaagagaaaaaagaaagggaaaaatttctacgaaggagagcttcggaaaaaaggaaaatgttgttttctatgcttcgttgcgtacgaaaagaagggaaggtgttttttcgccttcggctcaaaaaagaaaatttcgtccacatcgaagcatttatcatacatcagtgaaaggttaaggatatattacaaggtatgaacagcatacattaaaaacaagtttttgtttacatttataaaagttatctcaaaaagtttttcaagtattgtctgcagtctactatctaaatctccaaggagcttcggcttcggcgttatttttgatcatcagcttcggcttcgtcattctacatgaataaggtcgttggaagtcagaatcaagtttacaagaaaaggtaagcacaaggtatgatttcttactggatcaaggtggctacgagcttcgtctccagctttctctcgaccaccttttgtccatatcatttttatgaatcgatttgagatgcttcgggcgagatcagggatgtcatccaggattgatggtgacaaagtgaaatttggcctgttgacaattctcccatgatcacagccagccttcaggaatgctgcagctgtccctcgagaagctacccaggcacagaagtcaccatgcccagctatgacttcgacgagctcgtcaatctccccctcaatgtgttcgaaggtttttggtagatcttcagctgatggggtaaatttttcgctgctggctccaactgagtgaaaaatctttcttagtcgttgaatacaattattgctaaattcaaggcatttttcttgaagatttgtcagtagttttctaaaatccgaattttgctgagcttcggcttcaagttttgccttgagatcttgtttttcttgttcgaactgctcagactggcggagaagcttcgtgttcagttctgatatttttgcttcagcttccgccagtaaaccttcggctgcctggagctcaaagttctttttctcaaaagcatctgattgctcttttattttgttttccaaatttccaattataacttcatgctttttatcttcaagatcttgctgcatttgcaaggctttgctcaatagcatactctacataaacataaccttcgtcagacatgtttttattagaagtaataaaagataagggacaagtcattcaccttgaagttggagtaaaataaactaccaacgacgtgttgtcgtcggtaacggctgatgtccgtctctagcttcgggaatccaatattcctggacagagtgctgatgattttggcccctgtttggtctcgaatacactctaatttctcatcatcaacacctccgaagaggagtgccccaggtttgtatccacaggattgggcatactctttaagctcttctatttcagcttttgttaaatgttctccaattaagttttggaatgtaaaggctttgttttccgaagtttcatcagcaatttcttttcctttctttgacgctgcggtcacggcctcttcggcagcagtggtagcttcttctgcagccatgtttagtaacatttggtcaatatgttcaattgtgctttccaaattcaaatcttcagctgaggtaacttcggcggctgcggcctccgaaggtgcaatttcaatatctgccccctctgctgctgctcgtgttttttgggccgaagctcttggtggtgttttatcaattacctctgttacggtaataattctttgtttcttccccttgattgttttcctcgatttctcaggctccttgtccttctgaaaaaacttagtcagttgaggacccagtgggcttagcttcgcaggtaaggattcagtcattaccttcagaatttcttcaacaacagcagcagaaggtgatgcgggggtttcttttgcttcggatatttgttgcttcggagaagaagttttctttttctttggaattttcttctttactggctctttttcaccttcatctaaggcttcagttgccctttttctcttttggcctccggcacctttgttcagatcttcgtagtctgggtattcgaaacccaaggcgtccaacactcgatttagccttcgtttcggacgggtgccgaaggctgcggtcatcaattgatcttccttttttgaataattgccaagtatctcgttgcacatcacttcaatcgtatccagccactcttggcaaggagctttaaagtattttttaaatttgaagtagtaaggcaaacgtacaagttcaccttttttcttttcccccttcagcttcggcatttcccactcttttacactaggaaaaacttggaaagccaagaactcctgaaccaggtctcttgtactaatatgctctgcaacaattctgaattcatccattgctttttgtgtggtaccgtctactgacatgttgcagagaggccgggtttctccgaagattagttcgagtggactttgcacgagtttttccttgtcatcatcaaccttaacatagaaccattctgatttccacccagctgcccatttgcttcggtagctgatcacaggatacttcgtagttttccgataagcaaaattataacaaccaaagttctcatgtaaaccatcctttctagcctttgtctgatagtgcagttcgtgaactcggcagaagctgtcagcaaatggttccatcgcctggcttcggagtgcccagatataaacattaagcctaacgatagcgttaggagttagttggtgaaaatagattccaaaatttttcaatatctctgcaataatcccatggagggggaatcttaatccagcttttaggaagctcttaaaaataacaatctcatctttctccggcttcggggtagtctcttctcccccgaagcgtaatagcttcttttgattttcagtaaaatagcctgattttaccatcttggacagagcagccttcgaaacagtagatttcccgaagtccaaatgactgggtttgcttggcgtggcaaggtgataatcatcttcggggtcagtttccccagcatcttctccttctgcttcagcaatagcttgttccgcatcatcatcaggaatcttctccgaagtcactaacccggatcgttgcatggcttcggagatagggacagtctccgaagcttcagtttcgtccccctcacgctcaaccctagctgtagagcgaactctggccatttaattatgaacttgtgaaactttaatacttttttctccgaagcaggcttcaagatggagcttcgtgcaaatctgacaaacaagcttcggcgatggttaaaaattttggcagcaaaacagtgcaaatagcagtaaatgctgtggtaacttcacacctactcgtctgtttatatagtgccgcaggtaagaaggtgaagcgtcaggagttttacaccaggcggacactcgctcgcactcgctgtacggtggaccgcagtgaccgaacagtagctctgcaaggtggggccgctgcgcgcagggaaatcgaatcgtttctcgacaacgagctcagggaaggtgttttttgagaccttcggcgctctgaagcttaagaaacttttttttcacggatcaagctcgttacgaaaaacgatctagcaccgcgaaaggggctactgttgggtctatgcttcgtcgccgaaggtcttataaagagaagtgatcctcggatgaagctgttcgtacaagatagccgaaggtgcctcttcgcagagcttcggcattacaaaccgacttaaagatagaatgaccttttagtccataaaggtctgagtcaacgttgtaagttcttataaggggcatacttgtaattcctcacaggctgcgtcctgtgcctataaatagtgaacagtattccgttactgttcacgcattctgatttttgcaatcgcatttctcggaatacaacctttgtcaaggcataggtatcattgtattttatgattcaatacattaagtaaatattatattatgcatctgtgaatcatttatccattcttaccttttttactttgcattattctataacgtttattgaaagtttattacgaaggttcaacttcgtaataagacgcttatcaaccttcgtctaagatccattatcccaaaaggtataatgcttcacggacgaaggacaaaatcatttaacattttatgttgccttgttcttaattcatagcatttgagaacaagtccccaacagggtccccgggggcaggagcgcgggcggagcctggggcacgacgggaacaccataaggaggtgcgccgtagtgaggtgtagtcaggagggcgggcgccggaggacggggggtactcggtgcctggcccggccacatggcgatggtcccggtccaggggttgtagaaggacggccacgcgtggccgccaccccggccggagggaccaccacgagaggagccgccgctcccacggccgcccttgcgggagcgacgacccccgtcggtcgtagaggtcggacgaggggccgccgggacggcaggaggggggcgggtgggagccccggtcgacagaggacgggtgacctggccccctgaaggcggctgaccactggtgggagcgctgtagagggccgaggcaggagtgggtgcctcattcgccatggtgagctcctcgaggagaagctcgttccgcacggcgtggaaggtggggaaggacacgctcctcttgatgagagccttcaggtggccgtagcgggggttgaggccacgcaggaggttcagcaccagggtacgatcggcaactggctcgccgagatcgcggagagagtcagccaggcccttcatctggcggcagtattctcccacggagaggtctccctgagagaacaggtggaactgggcgtcgaggtggagcgcccgcgcatcccgattcccgaggaactggtcctcgagagcgagccacgcctggcgagcagtgtccgcctgatcgcggatgatgtcctgcagctcaacggtgatggtgccgtggagccacgagaggacaacgctgtccatgaggcaccaggagcgaggcggtggagcgtcgtggtcgacgaggacgtgatcgtcgaggacgaaccgccgcagcgtgaggaggacctgtcctcgccagcggggatagtgggaagacgccggatccaacaccatggacacgagggcccggatgttgtgcagaccagcggcctgagcgtggagagcagcgatgaggtcggcgtcgaggtcggaggcgtgggggtcctctgggggctccgcatcggcgagagtcgggtggccgaggagacgctgcgtggtggccatctgggtggtcagagcagcgcccagggcacgctcacgctccagggcgagggaggcagcgcgctcgcgctcccgcgaggccgtcacagcggcctggatcgaggcgagggtgctgacgagcggggggtcggtggtggggatggtggagggtgcgacacgatgactctaggtgggtgaagcgaaggcggggaagcccggcggggaggtgcgatgcaggggcagcggggatgaagcgcggagcggtccgaggccggtgatgtacggggcccctccatgggcgggctcgctgccggttgcagcgggggtgatggtgccggtggcggcagtggtgttggcgtccatggcggcggggttgcaggggcaggggcgcggcctggccaggtgcctggtcgaggaggcgcagggacgacgggcgccgctcccagggggaaggccggcggcggcggacgtgcctgggcgaggaggcgcagggacgacgggcgccgctcccagggggaaggccggcggcggcggacgtgcaggggcagaggccctgggcgcgcaggggaggaagaccggcggccgagggagtccggcgttggcgtccggggtcggcggacgcgcaggggtggagggagacggtcggcgcgtcggggaagagggacgacggcggacgcgcaggggcagagagggggaccggcggtccggcgccggcggctgggatggagagggagcccggcggctgtggagccggcggctgggagggagagggagccggcggcgggagaagagggatggcggctggaaaaactaaccctagccctatgataccatgttggaatgtgtgcccataccctaatcaggggttgggagtgatattaaatagagagagtaactgggccaaggcccattacacaggggtataacagtcattacacagggaataacacaaaccctagacgggtagtctaacatctatctctgattctgtgcttttaaaccaatgttttcaagtcggacgatttgctagtcgttctgactgaccgactagggcgattaatcacgattagtcggacgacttgggcgattaatcgcgattggtccaaaccgacttggacgaaatcgcgattaattggacgacgtggaaacagtgttttaaaccaaaggtctattttagcattataataaacttggtgttgaggtatttttttaaccaagcagacatatgtagatattgtttcaatagagttgctttgcataggaaaaatgtaatgactgaattttatggatgccaacgtcaagtattgtaaaaatgcgagaatatcgatctggtttgagtgaatccttccattagcactgtctaaagactgtttttagatgaattgatatgttgggataaggcaggtgctaagcatcttgagagtttggggcttgcagttgccttaaatagggtcttggctatttctagtgctacagtttagacttgtcgggcctacctgccttctcctttgcttatgtttcttctcttgtgttgttggtgaggagacatgggtgttaggttcatggtgcttaggtccagtttttttctgccctctggactttgtactctggtccattttggacctttttcctttattaatataatgatgtgcaactctcctgcgcgttcgagaaaaaataaaataaaataaggttgattattagataagactgcagattggtcaatgtcgatgagagtgctgcctgctgtaaaaacaggggcaaaaccagttattttggtgccgtgactggacaactatgcatattttgaaatcccaggctaaaatgttgttgataaaaaaacaagacccaataattatgctttttgaacattattgacatctatgagtctctatctcgtatctgttcacgtggcaagtccacaagtgaggtcaaaccctagatattttttgctggattgcttgttattcttaatgctagtgttactcgttttctgtacagagatgatgtgtggatgaattagcatagcttttactgagtcatgttatattaatcaattcacattgttaatgacaataatacctttaaaatggtttccatccttgtatcaggaagtcaagttttgaccatccaaagtgttagtgtgcagttcatacattatcactacaaattcaattagtaacactgataaaatcatacttgttattttggccaattttctagaataaattgaattcattaattcctactctgttccaaattataaaccggtttggcttttctaaatatatagtttttgctatgcacctagatatacaatatgtctagatgcataaaaagatatacataatatttcaatgccatcctatccttgactattattgtgtgattggaattaacttgaaaaaggaggaattctcatattaccatggttagtcacctggtgagaaattgcatctgactgcagaaccactgtaaacataaaccatattcacagttagagttgtactgattggtattagtcctttatgccctcaatatttacttctaccttttggtattatcttgtggttccctgtaaaatctgtatggattttctcaggtgcatggatgatatcctgctgatggtgtattacattataaatgctgttatttttttttgaacgtaatggcaggagctctgcctctcaattaagaagaatggaattgacccagttttaaggaaaaccgggcccaaaacctacacagagcgcacagtagaaaaaccggcgaaggagctaacaaacaacctagacaacgacagtccccacacacagacacatctagagtcatcgttgccaagctcaaaaagagacgagcagctccgacttcccaagacgagccgcacactgccaaagcaactcgacgacgcttacatccagacatcgacgcaaggaataagaccgcggcgcgccatcgttgccaagcctcagcacacccacacgaggcagctccgattcttcaccacgagcaaagacccacaacgccgaaccccgggagcgagcagacgccaaaagcgacaaaggccggaacaccatcgaaccaagcggggtgacaaagagcctccacaacacggacgaacacacaaactggaggtctcctgggccgcgccttcaagaaggagaaacgacgtcgaaaagccgtcgccgcccgcttggtacaaaccaagcaaagtttcctccgaagacctagcagagcagtgtagatcgccagcagcaaggagaaagctgaagggtcagccacgccgatgtcaccccgccaagccgtcgcgtgatgtcaccttctgccgcccaccgacgcaccaacccaccagccccaaccctcagagccccaacgccggtcgagcaccagcgagagacctcaagaaggccgaggcgagggttcccgcatggggcgagaggtccaaagacggcaccctcaatagggtaagggtggcgcccacgggcgtcaccgctgtccacccgcaagcgagcatggctttcaccggaggacctcccaccacacgccccaacgcacggagccagccggccctcgcgccgcacctcccgccggccatcctggcagcagccgctgcgacgcgccagaaccgctggcatgcgcacaaccgcaaacgccgccggggccactactgcccacatgccgacgccacacaccaccactaaggagccagaacctccgctcctcgacgacgcacggttgtcgccccgcccacagcagtagtctaggtcgtgaggggaggggcggcgaagaagagagcgccaccccacagcgcctacacgagccccaaaccgacgctgctgccgacgcaaaccccacctgccgccagcgccacgcgcccatgtcccctcgcccgctgccgccaggatgccgtcgaggccctggccggccctgccgcgctggagaagggacgaggaggcggcgggcttgacggcgttcagctccacgtagcacgacgccggcgccacggcagccggcagcttgaaggagccggagaagtgcagcgcggccgcggcgggcatccgctggcgctgggccgccgcccttctgccgcggaggatcctggagagcaggagctggaggatgccgccggcagcctgctgccgggcgggcttcagctcggccgccttgttcttcttgaagcaaaatcgccccgccgccaccttccttgggtcgcgcggacatccggcggcgccctccggtgacggcgaggtgggctggagtggagggagggggcggcggcggctagggttttggccgcccgtgtcgccccagtgagaggcgaccgagcgggatttgaccgtcgtatgcagaatctaaatgctgttattgactagtgtcatctggcggttttgcaggaaagaggtgagcttttgccacctgaggattctttagatatatctcgtaaagtgaaagaaatgtattgttatacttgttcagacattgtcaaggtattgcctttttattatccattgatcttcaactcttcacagctagtaaaattgtttaatggtagttgaagtccccctaatgaagttaaacatgcttgtaaaacttgttccctgtgtaaatactacttttgacctggttgtttaatgatattatgtttgcttgtgttgcttaacaatgactgtagataccttttggtcttcacctttacaccatgtagaatagttttatgcattgttttctgttacaaatatatatgtggcaagtttgatataagtaatacttccagcaagaggccatacagtaggcatctatgttaaacaaataaaaagatttagattataatgcatctccaatacaatttcaggagttcaagaagcatgacaggaagcctgataagtacatcaaacattggtcagctgttaaaccaaagactggggtcccatatacaattgacattggatatgaacgctttcttgggccagaggtttattcctatttctgtcatcaaaattgcaatactttttttttgttcctaaactgttcgtctaaaatggtataatattatggccaacaatcatcttttgagtgacaattacgttgtgtcgcagtgatgaatttattatagcttttgaccttacatacatcactctgacaattcatatattgtaagtacattgaaagctaagacagaaatttagcttattgatgctgtaaattaatatataggcttcatacaagagcatttctttatgttaagtgtgtagtaatggaactggttgacaatgtgaatgtacagacttcactggatgtggccattaagccatttcacactgtacttattctttccctgtggcaataccaatggagttcgtgggaacacggatcaaggattgacaatctgcctatcatatgattgctgcacaatttgttcaggaaatatttgtttctacaaattgttcttatttacattgccatactgaactaaagctgcatattagaatgtaacatttatgattaacttgaagaaatgggttaattctataatatttacggtaaaaacatttattttctagttttttttttttgggggggggggggggggtcccaatggaaagaaactagtaagtttgatggttcacacagtgaaactatgttgaattgctaaattgttatcaccagaggtcacatcaatgaatggatttgtagatatagagttgcgaatgactttgagatcatggtttccttggttcatccacaaaactaaatacttgtcaattgctattattctccggaactgtcttaacctctggcactatcttggttcattacctccttgtagatactatataaatacattggtgtctatatcgtatgcatcatttttacactgccaagtgatatcaataagcttttgtggtagttcagaattgttcccgtagatcatgaacactaaattggcactaaaaaatgggtgttatcaaaatatatcttgaaaaggttattaggtgctagaaatttgaagtttgttttgccctgagcgtaattctgttgttattaacctttttgttagaataaacttttaattttctaacaagatttgaccgagtgagaaacaatgacatacgcaattggccagtagcagcgcaaattaaagaaaagcttattcaataccggttgagatggtttgggcatgtccaccggagacccctagaggcaccggtgcatagaggcattataagacgggacaataatgtgaagagaggtagaagtcgaccaaacttgacatgggaagaggcaatcaaaagggacttgaaggaatgtaatatcccaatggagatgcgtttggatagaagtgtttggaaagaagctatccacgtgcccgaaccgtgattaggcctttttccttttagtgctctcaaaaacttttcctctcccctttctctctctttctctttttggtgacatcttgtttggtttcaactctagcctactctaacttgcttgggactaaaagactatgttgatgtacagttggtcatgttttttaggtcagaattaggtgtgcatctctaatcatttaccaacaaatgcagatcttcttcaatcctgagatttactctgccgatttctccactcctttgcccgagttgattgacaactgtgttcagtctgcaccaattgacacaaggagagctctgtacaaggtgctttcatcaaactctgcatgtttatctaagatgggaagtgatgtttgtgaatgctgtgacatttatcagaattctactttttgcagaatatagtattatctggtggatctaccatgtttaaagacttccacaagagactccaaactgatataaagaagatagtggatgaccgtgttgctgcgactaatgcccgtcatcgtgtggaagtgagagtaagtacagatggtttgattctcgatcgctatttaatgtactattgtagttgatatcctacatgtgagtaattttatttgcttcgtactgcccttttaatttgacattttcccctgttgtcagcctattgaagtcaacgtggttgcccatccaatacagagttacgcggtttggttcggggggtcactagctgcatctaaccctgacttctttgaggtacctgccacttgacatccatagtcctcaataaactggtaatcttcagtaataaataggggtgcaaatgtatcggatattgttaatactacatttttttatatttctattcgtatttgaatgtggatagtgtcaactacgtcggataggacaaaaatggacgtcgacatcataaatatacaatttgagtattcgaatacggtatcggatgttgaatatccggactccggtatggatagatctgaactctaaatggattcggacttgaataaggtcgaaaaatatccatactatttacacccttagtaatcatgcctgtacttctgctatctgatctaaacttataacgccagtaaaatgtggtgaattgcgatggttgagttcattgtgtgggaatgaaatctaagtgattcccttttctcatgcagttttgccacacaaaggaggactacgaggaacatggagccagcatctgcagaacaagccccgttttcaaaggaatgtactgaatttttcctcacgacccatcctctagctggtgagctcatttaggtttcttcgacagaatatagtcaattttgattcttttttggtgcgttccaaccattgtcgggccaccctgattaggtatgtagctctgtttgtactagttgtttgttttgtgttctgcgtcgaatgttgtgtatagccaacagtttggttcctgttcgaggtgcttcattgtagccagaacctcggacagtttagaggaaaaatatttggttattcttttacattagcttgttcagacagatttacgggactcttattaataagagaagtcaaatttaggactttgtcgtggatgaccacattatttcaattgaataatatggtatccctactttcaacgatt

SEQ ID NO: 159 - DNA, 32767 bp, Zea mays
  source 1..32767: mol_type = genomic DNA
tgaacgtgctcgttgcttaccccactgatggacagagccagaggtcacccacccaccccaccaacgcggggcgcacacagacccagacatatcactcacaacagtacaacacaagccacccacttcgcctgggttctggccttctgggtggctggttcttccttcccgcttccctcgtcaaccaaatcaaccgactcgccaggtctcctccggatcgccacgcgccgcgcaccacccgcccgcctccccgaatctctcgagcccgcgcgcaggcctcgatcgcggcggaccccgatgccccgcctcccggccaatccggcggcggcgacggaggagacatgagccggccgggactcgccggacctgccagtcatggacgccaccgcgcgcccggccatcgtcatcgacaacggcacagggtaaccccgacccctctcgcccactcgctgccgccggcctcggggccactggtgccagtactgctctatcgccgagcgttcccctcgagagcgcgcggttgcctcctgaaatgggggcccgtggcttggtttgtcgtgggacattctcgttgtgcagtttggaggtactgattgggttaggactgctccatatgtaactctagatcgccggttaggatcgggagacaccgagacagtacccaagccaagctgcccgttctgctcttctgggctgtgctgttgcgcggtcagggtataaacccgtgcaggtgcagtgaagggtaagagctggtgattgttttttatttacctccgttcgttgcaagttatgacgagtcgttccaacttcaccggagagtcaaagccaaaatgacggagagggatacaaagattcgtgacaccaaataggtatactataaaaaatacaattaataaagaacttaatgataattatttggtatcataactgttactgttttattacatgaatttgaccaaacttgagatactttcactttctgaaaaaatcggaatgacttataatttgggatggaaagtgtaaggtcgtgaggactgttataatggtaaccttttattttaattgagactgctcctcagcttctcgccaagtaaaatgtgaaattatatgtctccgtcctgcctgtgctgtactttatggtgcatatagtatcctcaactcaaggcagattccatggtaacttttcctcttgtactctcagcttccagcattttaggttgtaataagacatacgccttgaatgctgggtttatcaacttcccagacattgttgtcacattattccacatctgtttatgaacaactaacaaagtatagactcacaagaacagatctaaaggtaataatggccacagatgaatcttcttataggatgtcaacaattttcattctgaattgctttgatttctctgcaattgccgaactatgtcactctgtgtcttttttttcttgatagtatagcaccgaggagccgtctttcaccagtttatccttacaatatttttatactcttatgtttaggtatagcaaacttggattttctgggaactcagagccgtctttcaccctccctactgtcgtagcagcaaatgaatcttttctagaccagacagagctgttgagtagtgcaaactggatagcgcagtataatgcaggcatcatggctgatcttgacttttttattggagacgaggctctatcgcggtttagatctagtgggctgtacactttaagaagtccaatccgtcatggtcaggtatgtagatacttttccttttagtattgttgtccttcgtttgcgtttctacctccacatgcttttttttctcgaaagcgcaagaggcatgcacatcatttcattaagaagagagagaaaaaagattcaaaatggatcaatacagggagacacaaaaagctcccattactgcagcctaaaacaaagaaacaaaaagacatccatgaggaaaaaacccggaactactctgatctaaagatctgggattggggatgttaggagatctaggtttttagcccctcctaacacccacagatccctctcctcctcggtcctcttgatggctacattaagacagagagacaaaccgtcaaagacacatgcagttcgatggttccgcaagatccagaggccgagtctgataagcgagtttagcccttttctggctataccatgcagctgatcactgcatcttttccaccagagcatgatattctctttatgcacttgaggagtgaaatcctgaaggttaacctgtcccagcagcctaaactagtagcttcttgcaaacacacaactcacaaggagacggtcaatggtttctgtttcctggtcacaaagaggacactgatctgagtgatccagccccctcctttgaagtctatcagctatgcaacacctctgaagcgccacaagccataaggaaaatttgcattttggggggaccaggaatgccaaaccctgtctcagtgctcaaagtatgttgatccaatgaagagacttttgtaggctactttagcataatattttccattatgagcaaaactgaatatgtgtttgtcctccctttgtggatttatgtttactatgagaattgcatcccagagatcaagaaaatcagcaaggacttccactgtgagagctcatttgatgtctgtcggtaccctgaatcaggggtaccccttactacagcattaaagtgtaatactcaaaattgtatacaaggaatatatagtgatttcttcattttatgtgcctcatttgcatcataagaaaagagcccacacaccatttagagattaagtcaaacaaatgataaaaaaatgcatcatgctggagtttatatgtttgtgcattaaaaataattctaatgataataagctaataataactagaaattggattaaaccctaaattgaaaattagggtttgaaggtaagaagagaaatgatatgaaaaatataaataatataaatatatttctaaaatttgtatttttcattccataatatgatttgataacaaatttgcacaaggtttgaaactaaattcacattcaaatttaaacctagaagaaaagagaaaggaaaatgaataaataaaaagaaaaagataaaacttcagatgggccagcaactaccccattccggcccagctagcactttcctctccccacagcccacacttccgcctactgaccgggtgggcccgcttcgtcaggcgccttcgcgcacggaccgcgctcgaccattctctcgcccgcgctccttctcactgccggggcgccagccagcttgcgcactcaatgccgggtggggcccacctgtcgggtcctcttccccgttgaaccggaagccgcctgggtgctgggttgttgagaatctgcctgaactccggaccgaccgccgccagaccaggggatcccgccgccggagttctcgggcgggttcgttgcagtcgccgctaagcccacgcgtcatcaccggcctctccgatccgtgcgctggggcgaaacagatttgccgccattgccgcagctccgccggtgcctgcgaacgacccaaccgcctctccgcagtaataaaataggggccagccgtctgcgcatccataccgctatcgttggacgccatcgccagccaagggtcttgccagtgagagagagacgtagagcgccaccattaccgcgaagctcgccgtgagcagggggatcgggatttggggttgaccaccgccgcggtactcctctccggcgttacttctcggggcccgattactcacctggttgcgccgctgaatcgggagaaagatctccgaagcatcgcgactgggattagcttctgtggccgcgggaactcctcaccgggtctcctcccagtgtccgcgccgccccgtgccgtggtgcgagacgtcgtcactgtaaacaaaggtaattgacctcccctcttgcccagtatcgtctctgccgtgcgtaagaacctgctgtaggggtagtgggggttcggttgggccattcaccgtgcaccggcgagtgcgccgccgtgcgttctgagcgcgccgccatggctcggcggtgggtaggggatgggtcttcggacccttggattttgaccaacggccacgattaggcagtaggcgtacctcttcacgtgatcgatccggaccattgatccagtggagaacggctgcgattagaagttagcgtaccccttcgccacattggtcgggaaccgttgatctcgaatctaacggtagtggttagatctggtttcataaactctgggtcgtcggatcccgatccggcggctggtaatgcataccggttcggggataagcgatctaatctgagccctcgatatctgatcgtgcggctcaaaatgacccgtaccccttcggctgggattttatgcaaaggagcccccgcaaaatcccataaccaacccgccatccgcgcagtgagaatatgagtcttggagaaatatacaaattagcccctgcacttctttgattttggcgcgcagtccagaggtagataaaaatagagaaatgattagggaaattgatttttagtataaaaataattccagaaacttgtataattcatatttaattcatcttaggtccgaattaatttattccacttgctataaattcataataatattgtttatcatccggtaattttattatgaaacaaaggtataatttatgtgctcaatttctttcttgtccaacacttaaatctttataaaatcataacttcataaccgtaactccgaatttagtgattcttgttcctacgatctcgtagcagcgcgtagattattattacgcagtttgttctcatgtttggtgtgatgttaattttgtctataccatgtttgtttgtattgctacgactagcagtgaggtcacgaggacctgaagatcaccctggtaactggaatctcaagtctcaggcaagttgtgcccttgatcacttcttcttacctattcatgttctgattaatcataatgatctgcataggttaattttgatgggacccaataggtcaccctagattgtttatcctgaataccttgtttacccctgaatcacttgggtagttctgctactgctttatatggttttgggttaatatttcattatatctatgttccaattatgttgttattttatttatgttcatgataagatcattaaatgttaattggaacatagagcttaacttgagaaacacatgccaccacaagggtttatggacgcccttggctgattaattaggaaagctagtggaggactaccttacccgaaaggggcaagggcagtaggggagtggtcagtgtagggaggccctcaggaggattttgctgcgatggcggtcctgcaagggattcctgcattggagcttcctataaactgtagcgggttttctgaagctagtggaactttgtaaaggcctcgtagtgttaccctgcctcgcctcctcggtagaggtgtatgggaagtcgcgatcccttggcagatgggtaacatgacttgtgggtaaagggtaccacctctgcagagtgtaaaactggtatactagccgagctcacggtcatgagcagctcaggactctctgatgattaaattatggaacttaaactcaatttgtcatatgcattgcatcgcaggtgaggttgttacttttgttctactacttaattgggttggtatttacttatacttagtaattgctaataaaattttgaccaactttaaaagcaatgctcagctctaaccatcctctttggtaaaccttacacttcacgtgagctctcacctttggcgagttcatgcacattattccccacaacttgctgagcgatgaacgtttgtgagctcactcttgctgtctcacaccccccccacaggtcaagaacaggtaccgcaggatgaggcgcgtggaggatgctgcgatgagttcgtgagaggtctaggtcgtcgtctcccagtcaactttgggttgctggaccgttgtctccttataatgtaattatttattttgtatagaactcctgttatgtagtaaagatgtgacattcgatcctgtgccatgattcatcgtatgtgtgagacttggtcccagcacacctggtgattatgtttacgcccgggctttggacccctaaaacccgggtgttacagaagtggtatcagagcaatgttgactgtaggacgaaacctagatagaactggacaaccaatacttacttacctttactactctgattcttctctaaacttttcttaacctttctcatctatttccgctttactctgattattcttaccatttctttctaaaagacaaatgtggatttcacactttgaaattccgtacctaaagtgacctttaggaataggagacctactcttaggaacaaaacaaaactatttttgtaggtatttatgtgcttcaatgtttgttcttatgatacttgtctgatttggatctttgattgagtgtgatgagttgtggagtaatgtccacaatcacatctgcatatacatatagaaaaaaaaacggttataaaaatatctaaatgaactaggttatccctcatcaaagaatctagcctagcaaaatccatcttatcttgaaaaagtctatcctacactcatagatctatcttatcctaaaaaaaatagattctcatcttatcttgaaaagatttatcttatcctaatagatctatctgacctcaaaagattctaccttatccttatggattcatcttaccccaataagcatatttatcccacgctagtgtaacaaccatgatctagcctaaaataaataagatcttatctagtcaaactagtcacaccaatctaacctagatctgatctaatctaaagtgacttatcaaacatgttagataatactgatgaaatagattagactctactcctatagaacaggtcttaacttagttcaccctgcactaaattaagaaggatagatcgacttggccatatgcagctaccttaaccatccaatagttgcataaccccacaattttaacctagcaagagattctaatctacctacaccatacaatccatcctactcacatatgtcctagccatatgtccttaactcggatgacaactccaagaaataaaggccaaagaagaccaaccatgtcaaagaaggataagcatcaactcaagacttcaaagatcaagttgaatcgccatcggaatcaagatccacagttcaggatgaagtctttccttattatactcttccctgccacaacctattatctatacttgccataatcgtacctcatctgacctaatagatggctagacgtatatgtctatattttccaaatcatctactagctactataaaaaaaacatgaaacaaaacttttgattcctaaaccaagctggttgcatcccttttcttcaaatctcgaggacgagattatttttatggggggtaggatttgtaatactcaaaattgtatacaaggaatatatagtgatttcttcattttatgtgcctcatttgcatcataagaaaagagcccacacaccatttagagattaagtcaaacaaatgataaaaaaatgcatcatgctggagtttatatgtttgtgcattaaaaataattctaatgataataagctaataataactagaaattggattaaaccctaaattgaaaattagggtttgaaggtaagaagagaaatgatatgaaaaatataaataatataaatatatttctaaaatttgtatttttcattccataatatgatttgataacaaatttgcacaaggtttgaaactaaattcacattcaaatttaaacctagaagaaaagagaaaggaaaatgaataaataaaaagaaaaagataaaacttcagatgggccagcaactaccccattccggcccagctagcactttcctctccccacagcccacacttccgcctactgaccgggtgggcccgcttcgtcaggcgccttcgcgcacggaccgcgctcgaccattctctcgcccgcgctccttctcactgccggggcgccagccagcttgcgcactcaatgccgggtggggcccacctgtcgggtcctcttccccgttgaaccggaagccgcctgggtgctgggttgttgagaatctgcctgaactccggaccgaccgccgccagaccaggggatcccgccgccggagttctcgggcgggttcgttgcagtcgccgctaagcccacgcgtcatcaccggcctctccgatccgtgcgctggggcgaaacagatttgcccccattgccgcagctccgccggtgcctgcgaacgacccaaccgcctccccgcagtaataaaataggggccagccgtctgcgcatccataccgctatcgttggacgccatcgccagccaagggtcttgccagtgagagagagacgtagagcgccaccattaccgcgaagctcgccgtgagcagggggattgggatttggggttgaccaccgccgcggtactcctctccggcgttacttctcggggcccgattactcacctggttgcgccgctgaatcgggagaaagatctccgaagcatcgcgaccgggattagcttctgtggccgcgggaactcctcaccgggtctcctcccagcgtccgcgccgccccgtgccgtggtgcgagacgtcgtcactgtaaacaaaggtaattgacctcccctcttgcccagtatcgtctctgccgtgcgtaagaacctgctgtaggggtagtgggggttcgggtgggccattcaccgtgcaccggcgagtgcgccgccgtgcgttttgagcgcgccgccatggctcggcggtgggtaggggatgggtcttcggacccttggattttgaccaacggccacgattaggcagtaggcgtacctcttcacgtgatcgatccggaccattgatccagtggagaacggctgcgattagaagttagcgtaccccttcgccacattggtcgggaaccgttgatctcgaatctaacggtagtggttagatctggtttcataaactctgggtcgtcggatcccgatccggcggctggtaatgcataccggttcggggataagcgatctaatctgagccctcgatatctgatcgtgcggctcaaaatgacccgtaccccttcggctgggattttatgcaaaggagcccccgcaaaatcccataaccaacccgccatccgcgcagtgagaatatgagtcttggagaaatatacaaattagcccctgcacttctttgattttggcgcgcagtccagaggtagataaaaatagagaaatgattagggaaattgatttttagtataaaaataattccagaaacttgtataattcatatttaattcatcttaggtccgaattaatttattccacttgctataaattcataataatattgtttatcatccggtaattttattatgaaacaaaggtataatttatgtgctcaatttctttcttgtccaacacttaaatctttataaaatcataacttcataaccgtaactccgaatttagtgattcttgttcctacgatctcgtagcagcgcgtagattattattacgcagtttgttctcatgtttggtgtgatgttaattttgtctataccatgtttgtttgtattgctacgactagcagtgaggtcacgaggacctgaagatcaccctggtaactggaatctcaagtctcaggcaagttgtgcccttgatcacttcttcttacctattcatgttctgattaatcataatgatctgcataggttaattttgatgggacccaataggtcaccctagattgtttatcctgaataccttgtttacccctgaatcacttgggtagttctgctactgctttatatggttttgggttaatatttcattatatctatgttccaattatgttgttattttatttatgttcatgataagatcattaaatgttaattggaacatagagcttaacttgagaaacacgtgccaccacaagggtttatggacgcccttggctgattaattaggaaagctagtggaggactaccttacccgaaaggggcaagggcagtaggggagtggtcagtgtagggaggccctcgggaggattttgctgcgatggcggtcctgcaagggattcctgcattggagcttcctataaactgtagcgggttttctgaagctagtggaactttgtaaaggcctcgtagtgttaccctgcctcgcctcctcggtagaggtgtatgggaagtcgcgatcccttggcagatgggtaacatgacttgtgggtaaagggtaccacctctgcagagtgtaaaactggtatactagccgagctcacggtcatgagcagctcaggactctctgatgattaaattatggaacttaaactaaatttgtcatatgcattgcatcgcaggtgaggttgttacttttgttctactacttaattgggttggtatttacttatacttagtaattgctaataaaattttgaccaactttaaaagcaatgctcagctctaaccatcctctttggtaaaccttacacttcacgtgagctctcacctttggcgagttcatgcacattattccccacaacttgctgagcgatgaacgtttgtgagctcactcttgctgtctcacaccccccccacaggtcaagaacaggtaccgcaggatgaggcgcgtggaggatgctgcgatgagttcgtgagaggtctaggtcgtcgtctcccagtcaactttgggttgctggaccgttgtctccttataatgtaattatttattttgtatagaactcctgttatgtagtaaagatgtgacattcgatcctgtgccatgattcatcgtatgtgtgagacttggtcccagcacacctggtgattatgtttacgcccgggctttggacccctaaaacccgggtgttacgacacggtgcctgcgcaactatccctagtcgcgcgggaaaacagcacccaacctttccgcatgggcagctccggggccgccgcgtggccggaaaaggtggtatactcaagaaggcaccggacccctatactcacgacctgtacctcggagtatggcccagggctcccatgcaagcatgccggaccccttgggtgaggcccggacccctctgagcggggtccaggccacccacagcgaggtcccggggcaggggataccctggcctaagcaagggtccggtactgacacgtgtccagactttatcctgtgtgcttgcgctccccgctcaggcggagacccgatgctgccacgtggcttgttgcccatgacgtaagccagcgggcggagcctgacgtaaggcctctgggccgcgcggtctctgcatttattgcggagaggacgcgccgcctgcccactctgctgacaggcgatatgccgcctcggcatttattgtgacctgtccactcagctggcagcggcgtccaggccatcctacaggcggcgtgcctgtccagtccattgccaaacagtacgctcgtgctgcaaggtgcactgtgtccaccattgcttatgcattgccagggaagcttcccctgcacgccaataccacgcagaccgcggatgttagggtacaagaagattgctccagcaactccaagtattacaaccattatatttctaggcccacatgtcggggctcagcacctttgtacgcgccctgaaagtcgcctagagggggggtgaatagggcgaaactgaaatttacaaagttaatcacaactacaagccgggttagcgttagaaatataatcgagtccgcgagagagggtgcaaaacaaatcgcaagcgaataaggagtgagacacgtggatttgttttaccgaggttcggttcttgcaaacctactccccgttgaggtggtcacaaagaccgggtctctttcaaccctttccctctctcaaacggtccctcggaccgagtgagctttcttttctcaaatgcttggaacacaaagttcccacaaggaccaccacaaggttggtgtctcttgcctcaattacaagtgagtttgatcgcaagaaagaatcaaagaaagaagaaagcaatccaagcgcaagagctcgaaagaacacaagcaaatctctctcactaatcactagggcgttgtgtggagtttggagaggatttgatcacttgggtgtgtctaaaattaaatgctagagctcttgtaagtagttgaagtgggaaaacttggatgtcttgaatgtggtgtggttgggggtatttatagccccaaccaccaaactagccgtttggtggtggctgactgtcgtatggtgcaccggacagtacggtgcacaccggacatgtccggtgcgccagccacgtcactaggccgttgggattcgaccgttggagcttctgacttctgggcccgcctggctgtccggtgtacaccggacaagtactgtagattgtccggtgcaccgtttcgtgcgtgtctgacttctgcacgcttctggcgcgcattaaatgcgcctgcaggtgaccgttggcgcgaaatagccgttgctccgctggctcaccggacagtccggtgtacaccgaacagtccggtgaattatagcggagcagattcccgaagctggcgagttccagaggccgctcttccctggggcaccggacactgtccggtgtacaccagacagtccggtgaattatagcggagcccctctgaattttcccgaaggtgacgagtttgacttggagtcccctggtgcaccagacactgtccggtggtgcaccggacactgtccggtggcacaccggacagtccggtgcgccagaccagaggtgccttcggttatcccttgctctctttgttgaaccccatacttgatctttttattggttaagtgtgaacctttagcacctatataacttatacactagagcaaaactagttagtccaattatttgtgttggacaattcaaccaccaaaatcaattaggaaataggtgtaagcctaattccctttcaatctctccctttttggtgattgatgccaacacaaaccaaagcaaatatagaagtgcataattgaactagtttgcataatgtaagcgcaaaggttgcttgtaattgagccaatataaatacttataagatatgcatggattgtttctttatttttaacattttggaccacgcttgcaccacatgttttgtttttgcaaattcttttgtaaatcctcttcaaatttcttttgcaaatggtcaaaggtaaatgaataagattttgcgaagcatttactagatttgaaattctccccctgtttcaaatgcttttcctttgacttaaacaaaactccccctaaataaaattctcctcttagtgttgaagaaggttttgatatatcaaatttgaaaaattactttttcccccttttgaacacaataaggtaccaatgttaaatttgtcaattgagaatcataccaattgaaaaactcttttttttttaaaattaggtggtggtgcagtccttttgctttgggctaatactttctccccctttggcatgaatcgccaaaaacggagtcattagagcccttggaattactttctccctctttggtcataaataaatgagtgaagattataccaaagacggagtccttttctccccaaagatggagagttgctcggagtgatggcgaaggatgagttacggagtggaagcctttgtcttcgccgaagactccaattccctttcaatacacctatgacttggtttgaaatagacttgaaaactcattagtcatagcatatgaaagagacatgatcaaagatatataaatgagcttgtgtgcaaatcaacaaaagaagttcctagaatcaagaatatttagctcatgcctaagtttgttaaaagtttgttcatctagtggcttggtaaagatatcggctaattgatctttagtgttaatatatgaaatctcgatatctcccttttgttggtgatcccttaaaaagtgataccgaatggctatgtgtttagtgcggctatgctcaacgggattatccgccatgcggattgcactctcattatcacatagaagaagaactttggttagtttgtaaccgtagtccctaagggtttgcctcatccaaagtagttgcgcgcaacaatgtcctgcggcaatgtactcggcttcggcggtagaaagagctacagaattttgcttctttgaagcccaagacaccaaggaccttcccaagaactggcaagtccccgatgtgttctttctattaattttacaccctgcccaattggcatccgaataaccaattaaatcaaaagtggatcccctaggataccaaagcccaaacttaggagtataaaccaaatatctcaagattcgttttacggccgtaaggtgagcttccttagggtcggcttggaatcttgcacacatgcatacggaaagcataatatccggtcgagatgcacataaatatagcaaagaacctatcatcgaccggtaataccttttgatcgacggatttacctcccttgtcgagatcgagatgcccattggttcccatgggtgtcttgatgggtttggcattcttcattccaaacttgcttagaatatcttgagtatacttcgtttggcttaggaaggtgccctcttggagttgcttcacttgaaatcctaagaaatacttcaactccctcatcatagacatctcgaatttttgtgtcatgatcctactaaattcttcacatgtagactcgttagtagatccaaatataatatcaacataaatttggcatacaaataagtcattttcaagagttttagtgaagagtgtaggatcggcttttccgactttgaatccattagtgataaggaaatccctaaggcattcataccatgctcgtggggcttgcttaagcccataaagcgccttagagagtttaaacacatggttagggtactcactatcttcaaagtcgggaggttgctcaacatagacctcttccttgattggtccattgaggaaagcactctttacgtccatttggtaaagcttgaagccatggtaagtagcataggccaataatatacgaattgactcaagcctagctacgggtgcataggtttcaccgaaatcaaaaccttcgacttgggagtatcccttggccacaagtcgggctttgttccttgtcaccacaccatgctcgtcttgcttgttgcggaagacccatttggttcgtacaacattttgattaggacgtggaactaaatgtcatacctcattccttgtgaagttgttgagctcctcttgcatcgccaccactcaatctgaagtagtgcttcctctaccctgtgtggctcaatagaggaaacaaaagagtaatgctcacaaaaatgtgcaacacgagatctagtggttactgttaaggcccataaggcccatatattattgactgcctatatatatgctacagtaccccgaggggattattatctcacctaatccaggttagtcacatggtaacagagcaggttagggttagggtttacatctaaacccaaccctgatccaattttttttcggcgccgtcgcgccgtcgctgtgctgccctcgcagccagcttcttccccttctccggttgctgtcgcggccctccctctcccgcccgtcgtcgcggccgcgggcctccttttcccggccgccgtcgcggcctgctgtccgccgtctgccatccgccgcccgccgtctgccgtccgccggatccagcctgcgcatccaccgtccgccggatccgccgtctcggtctgcgccccatctgctgcttcatcgtggatcgagctccccctcttcctgtgcccgccaggaccggatcttggtcgccccgcgcggatctgtcacgtccgccgccaggggccgtccgccgccctcttcctgtgcccgccaggagtccgttgctgctgtcgctgtgcctgccaggagcccgccatcttcttcctggtggtccgccggctcggcggctggccagctgcctgccgagtcgaactacagtctgcagggcgccttcaccggatctgcgctgtcagcaattctgcgctgtctgtctgatccgcctgatccggatctgcgccctcgccacttctgtgccgagcaggactgcaactctacaccgttgctgctgtcgctgcttctgcgcaggtggcttccagtgatctcgattctctgcagcagggcgacaactgctgtccatctcagcttctgctgcccaggatcttcgccaacttgtccaagtcggactgctgtcagctgcagctcttctggtttgtttggtttcacttatctccattgaattcaatatggcgacaaatgttattgtagtcaatatcactctagatggtcaaaactatccggagtgggctttctgtgttgagactgcactccggggacatggattactcttccatttgactgatgcggcacctgttcttgctgatgatcgtcgcaatgctgctgatatcaaaacgtggcaacttaatgatggtaaagtgatggctgctatggtgaacagcgtcaaaccgtctatgattatgagtttgtctaaattcaaaactgctaaatccatctggtctcatttgaaggagcgttttgttcaggatagtggtgctctattacacaccctcatgcagcagacacatgttattgagcaaaatgatatgagcattgatgagtattactcagcctttgatcgcctgatgagtgctttgacatcaatggtgcctgcttgtactgctgatccatgtccggctcataagtttattgagaagttcttcacttacagatttgttatgggtgttcgggccgagtttgattctcttcgtgctcgtttacttcagggctctgacactctcacaatggctaaggcattgtctgatttacttgctgaagagactcgtcttcactcactttcctctactggtggtaatcctcacagtgtgttggctgctgcccagaaacctaagaatgtttttaagccttgtgatcattgtggcaagaccaatcatcgatctgagctttgctttgtcaagtttcctgagaagttgactgattttcgtgcacgacgtgctgctcgtggtcgtggtccaggaccgtctactagaggttcagttgctgttgctgccacttcgtccgcttctacttcagagtcggcttgggtacttgattcaggagcctcctttcatgtcacgtctgatcagtcaaagttggcttctactacacctgtcacagatggtgcttcagtgcagacagctgatggtactgtatgccacattactcataagggttctctttctgatcctcactttacagtacctaatattttctttgtccctgacctatctatggatctcctttcggtaggtcaaattacggatcataattgctttgtcggatttgatgactcatcttgttttgtacaggaccttcgcacaggggaagtgattgggactggccgtcgccgtagagcagctcctcgcctctacatcttggactctttgcggcttccttccttggctacatctccagcgcatgtcctttcagctacccttgcttctgttgcgtcttttgcccagtggcatcatcgtctaggtcatttgtgtggctctagattgtctactctaataaagtcaggttgcttaggtcatacttcggttgagtctaatttttattgtaagggttgtcatcttggaaaacaaatacaacttccatattttactagtacttctcattctgttgaaccgtttgatttggttcactctgatatttggggtcctgcaccttttgtgtcaaaaggtggatataaatactatgtcatttttattgatgatcattctcgctacacttggatttatttcatgaaacgccgttctgagctgatttctatttataaaacctttgctcgcatgattcacactcaattttccactcatattaaaaccttccgttctgattctggtggtgaatatttatctgataattttcgccagtttttgacttcagagggcactcttgctcagctttcttgtcctggtgctcatgcacagaacggtgtggctgaacgcaaacaccgtcacattatagaaactgctcgcactttgttgatatcttcttttgttccttcacatttttggggtgaagcagtttctactgcggtttacctcatcaatagacaaccgtcatccaaactctctggcaaaacacctggtgaagtcctttttggaactcctccacgttatgaccaccttcgagtttttggatgtacgtgttatgtactattatcacctcgtgaacgtactaagttgactgctcaatctgttgagtgtgtttttcttggatacagccctgaacataaaggctatcggtgttatgattcatcttctcgtcgcatgcgtatttctcgagatgtgagctttaatgaaaaccgacccttcttttacaactcttccactcattcttcttttcattccacagagtctaccgccttcatgagccttcctcccatttctgaaacttcatcagcattaccacctactgtttctacacccgatgttcttattcccatcacaccaccttccacttccacatcatctcagtcttactcttccaaaccacctgttactcagacttacattcgtcgtcctcgctctaatcccacagccagtcctgctgatgatcctgttgccgatacttgtactaacaatgatgactctcatgttgtttttaatcaggggtatcatcttcgtgaccgtggcactattgcagctccagaacgttatgggttttcccgtgccggtgcagtcattgctgaaccatcatcttataaagaggcttctgttatacctgagtggcagcgtgctatgactgatgaattaaatgcccttcatcgcacatgtacatgggatgttgttccgttacctgctggtgttgtacctatcacgtgcaaatgggtcttcaaagttaaaaccaaatatgatgggtctattgagcgatataaagctcgtcttgtggccagaggttttcaacagactcagggtattgactatgatgagacttttgcacctgtggcccatctgactactgtccgagccttacttgctgttgcagcctcatcttcttggagtatctctcagatggatgtcaaaaatgcgtttcttcacggtgacctacatgaggaagtctatatgcatccacctcctgggatagaggttccctcagggcatgtctgtcgtcttcgtcgagccttgtatggtctcaaacaagctcctcgtgcttggtttgagagatttgtttctgtcatcaaggcttgtggtttctattctagtgatcatgatcctgcattgttcattcatgtgtcttcacgaggccgcacgttgctattactatatgttgatgacatgttgattacaggcgatgatccagaccatattgctcatgtgaagacgtacctgagtaaggaatttcaaatgtctgacttgggggcactcagttattttttgggcattgaggttttgcagactcaaaatggtatttatctttctcaggccaagtacatacaagaccttcttgatcgttctggtcttagtgacactcgcactgttgccacgcctatggatcttcacttatctctttgtccgactgatgggacacctttggaggatccatctcgatatagacatcttgttggcagcttagtttaccttactgtcaccaggccagatattgctcatgcagttcagatcttgagtcagtttgtctctgctcctacatcagttcattatgggcacctacttcgtgtgcttagatatttacgggggacaaaaacacaatgtttattttatgactcaaattccccacttcagcttcatgcttactctgatgctacatgggccagtgatcctacagatcgtcgctccatcactggttactgtattcttcttgaatcatcccctgttgcttggaaatccaagaagcaagctgctgtatctagatctagtactgaagcagaacttcgagccctggctactactactgctgagattatctggatccgttggctcttggctgatctaggtgtttcttgtgactcgcctactcttcttcgctgtgacaacactggagctatacaaatctgtcatgatccagtgaagcgtgaactcacaaaacacattggtgttgatgtctcattcactagatctcattgtcatcagaagaccattgatcttcaatatgtgccctcagaattacagcttgcggatttcttcacaaaagcacaaactagggcacaacatcagtttcatctactcaaactcaatgcttcaaatcctccacttccgccttgagtttgacagggggtgttaaggcccataaggcccatatattattgactgcctatatatatgctacagtaccctgaggggattattatctcacctaatccaggttagtcacagttacccctttatgaatgtcgccaaggatggtgtcgacggggtgatctcgttggattgcttggtggactcttgggtgtggcggcctttgttcttcatcctccttgtcttggtcatttgcatctcccccttgatcattgccgtcatcttgaggtggctcatttgcttgatcttctatttcatcaacttgagcttcatcctcgttttgagtcggtggagatgcttgcgtggaggaggatggttgatcttgtgcatttggaggctcttcggattccttaggacacacatccccaatggacatgttccttagcgcgatgcacggagcctcttcaatacctatctcatcaagatcaacttgctgtacttgagagccgttagtctcatcaaacacaacgtcacaagaaacttcaacttgtccagaggacttgttaaagactctatatgcccttatgtttgaatcatatcctagtaaaaagccttctacagtcttaggagcaaatttagattttcttcctcttttaacaagaataaagcatttgctaccaaagactctaaaatatgaaatattgggctttttaccggttaggagttcataagatgtcttcttgaggattcggtgtagatataaccggttgatggcgtagcaggcggtgttgaccgcctcggcccaaaaccgatacgatgtcttgtactcatcatgcatggttctagccatgtccaatagagttcgattcttcctctccactacaccattttgttgtggcgtgtagggagaagagaactcatgcttgatgccctcctcctcaaggaagccttcaatttgtgaattcttgaactccgtcccgttgtcgcttctaattttcttgatcctcaagccgaactcattttgagcccgtctcaagaatccctttaaggtctcttgggtgtgagatttttcctgcaaaaagaacacccaagttatgcgagaataatcatccacaataactagacagtacttactctcgtcgatgcttatgtaagcgatcgggccgaatagatccatgtgtaggagctccagtggcctgtcagtagtcataacgttcttgtgtggatggtgagcaccaacttgctttcctgcttggcatgcgctacaaatcctgtctttctcaaaatgaacatttgttaatcctaaaatgtgctctccctttagaagtttgtgaagattcttcatcccaacatgggctagtcggcggtgccatagccaacccatgttagtcttagcaattaagcaagtgacgagttcagctctatcaaaattcactaagtatagctgaccctctaacactcccttaaatgctattgaatcatcacttcttctaaagacagtgacacctacatcagtgaataaacagttgtagcccattttgcataattgagagacggaaagcaaattataatctaatgaatctacaagaaaaacattggaaatagaatggtcaggtgatatagcaattttacccaatcctttgaccaaaccttgatttccatccccgaatgtgatagctcgttggggatcttggtttttctcgtaggaggagaacattttcttctcccctgtcatgtggtttgtgcacccgctgtcgataatccaacttgagcccccggatgcataaacctacaaaacaagtttagttcttcactttaggtacccaaatggttttgggtcctttggcattagatacaagaactttgggtacccaaacacaagtctttgaccccttgtgcttgcccccaacatatttggcaactaccttgccagatttgttagtcaaaacataagctgcatcaaaagttttaaatgagatgtcatgttcatttgatgcactaggagttttcttcttaggcaacttagcacgggttggttgcctagagctagatgtctcacccttatacataaaagcatgattagggctagagtgagacttcctaaaatgaattctcctaattttgtcctcgggataaccgacagggtataaaatgtaaccctcgttatcctgaggcatgggagcattgcccttaacaaagttggacaatttcttaggaggggcactaagtttgacattgcctccctgttggaagccaatgccatccttgatgccagggcgtctcccattatagagcatacttctagcaaatttaaatttttcgttttctaagttatgctcggcaattttagcatctagttttgctatattatcattttgttgtttaattaaagccatgtgatcatgtatagcattaacatcaacatttctacatttagtacaaatagaagtgtgctcaacggtagatgtagagggtttgcaagattttaattctacaaccttagcatgcaatatatcattcttagttctaaggtcagaaatagtagcattgcaaacatcaaaatctttagccttagcaattaattttccattctcaatcctaaggctagcaacagacatgtttcattcttcaatcttagcaagcaaatcatcattatcatttttaagattgggaatatcacaaacatttgaatcaaccttagctaatagattggcattttcatttctaaggttgtctattgtctcatggcaagtgcttagctcactagataatttttcacatttctcaacttttagagcataagcatttttaactttaacatgctttttgttttccttgattaggaagtcctcttgggagtccaagagatcatccttctcatggatgacactaatcaattcatttaatttctctttttgttgaatgtttaagttggcaaaaagagtgcgcaagttatcttcctcatcactagcattttcatcactagatgattcatatctagtggaggatttagatttaaccttcttctttttgccgtcctttgccatgaggcatttgtggctgatgttggggaagagaagtcccttggtgacggcgatgttggcggcgtcctcgtcgtcggaggagtcgctagagctttcgtcggagtcccactcccgacaaacatgggcatcgccgcccttctttttgtagtatctcttcttctcctttcttctacccttcttgtcatcgcacctgtcactgtcactagatattggacattttgcaataaaatgaccgggcttaccacatttgtaacacactttcttggagcggggtttgtagtacttccccctcctttgtttgaggatttggcggaagctcttgatgacgagcgccatttcctcattgtcgagcttagaggcgtcgattggttgtctacttggtgtagactcctccttcttttcctccgtcgccttgaatgcaaccggttgagcttcggacgtggaggggccgtcaagctcgttgattttccgtgagcccttgatcataaattcaaagctcacaaaattcccgattacttcctcgggagtcattagagtatatcttgggttgccacgaattaattgaacttgagtaggattaagaaaaataagtgatcttagaataaccttaaccacctcgtggtcatcccactttttgctcccgaggttgcgcacttggttcaccaaggttttgagccggttgtacatgtcttgtggctcctctccttggcgtagacggaagcgaccgagctccccctcgatcgtttaccgcttggtgatcttggtgagttcatcaccctcgtgcgccgtcttgagcacgtcccaaactttcttggcgctttttagtccttgtaccttgttgtactcctccctacttagagaggcgaggagtatggttgtagcttgggagttgaagtgctcgatttgggccacttcgtcctcatcataatcctcatcccctacggatggtacctgtgctccaaactcaacaacattccatatacttttgtggagtgaggttagatgaaatttcattaaatcactccacctagcataatcttcaccgtcaaaagttggcgttttgcctaatggaacggaaagtaatggagtatgtctagaagtacggggatagtgtaagaggatcttactaaacttcttgcgctcatggcgcttagaagttatggagggcgcgtcggagccggaggtagaaggtgatgaagtgtcggtctcgtagtagaccaccttcctcatcttctttattttgtcgccactccgatgcgatttgtgagaagaagtcttcttctccttcttctccttcttatccttgttgcgggactcttccgatgaagctttcccgtggcttgtagtgggcttgtcgccggtctccatctccttcttggcgagttctcccgacatcacttcgagcggttaggctctaatgaagcaccgggctccgataccaattgaaagtcgcctagagggggggtgaatagggcgaaactgaaatttacaaagttaatcacaactacaagccgggttagcgttagaaatataatcgagtccgcgagagagggtgcaaaacaaatcgcaagcgaataaggagtgagacacgtggatttgttttaccgaggttcggttcttgcaaacctactccccgttgaggtggtcacaaagaccgggtctctttcaaccctttccctctctcaaacggtccctcggaccgagtgagctttcttttctcaaatgcttggaacacaaagttcccacaaggaccaccacaagattggtgtctcttgcctcaattacaagtgagtttgatcgcaagaaagaatcaaagaaaaaagaaagcaatccaagcgcaagagctcgaaagaacacaagcaaatctctctcactaatcactagggcgttgtgtggagtttggagaggatttgatcacttgggtgtgtctagaattaaatgctagagctcttgtaagtagttgaagtgagaaaacttggatgtcttgaatgtggggtggttgggggtatttatagccccaaccaccaaactagccgtttggtggtggctgactgtcgtatggtgcaccggacagtccggtgcgccagccacgtcactaggccgttgggattcgaccgttggagcttctgacttctgggcccgcctggctgtccggtgtacaccggacaagtactgtagattgtccggtgcaccgtttggcgcgtgcctgacttctgcgcgcttctggcgcgcattaaatgcgcctgcaggtgaccgttggcgcgaaatagtcgttgctccgctggctcaccggacagtccggtgtacaccggacagtccggtgaattatagcggagcagattcccgaagctggcgagttccagaggccgctcttcccttgggcaccggacactgtccggtgtacaccggacagtccgatgaattatagcggagcccctctgaattttcccgaaggtgacgagtttgacttggagtcccctggtgcaccggacactgtccggtggcacaccggacagtccgatgcgccagaccagaggttgccttcggttatccttgctctctttgttgaaccccatacttggtctttttattggctaagtgtgaacctttagcacctgtataacttatacactagagcaaaactagttagtccaattatttgtgttgggcaattcaaccaccaaaatcaattaggaaataggtgtaagcctaattccctttcacgccccccttgagctataaaagggggaggcatgcaacgttacaaagggagactcaagcacacttagacctaactcaggctcacaagttcaaataagctcaatacattacacagtggagtagggtgttacgctctggcggcccgaaccactctaaaactcttgcgtgttcttgagtttatcgttcatctaccaacaggcaaaacgcttaagccccctcatcttaggattagggcgggtgtattccgccacccggccggaggtttccctctccgacatttggcgcgccaggtagggggcttggcattagtttttgcttattttctcgctcagcatgatggtgcaaattgttgagcaccgcgccgagacttcagtggatttcgtggtggaggaagaagctgttttttccacgccacaggttcccaaccgccctgtgccgggcactgctgctgtgcacgctgcacagcagcatacaactgcgcagacatcccggactccgtcgagaacggcgccgggagcattgtctgcagctagggagttgctgcgtcaccctccaagctccatggcatcgtcaggggccatgaagcagtggcgcgacgacgtcgaccggctactcggcatggcacattccaccgcaaccaggtccaagcctcggtcatcccgacgccaacgtgaggcgacggcgtctgtgcgctcaccctcagcaaggggcgcgcagaccgacgacctccgggcagagctcaaccgcaggcgtgcgggagaggacacccgggtctctttagagagggcgcgcgagcgccggcaaaacatcgagggtcgcaacctcgatcaagacttcgctgcggtagcaccgcaggccctaatggacacccggtcccaagcaggtgtccctttggccggcgtgggctgcgccgccctcgcggatcatctccgcgcggcgtcatggccatccaagttccggccgcacctgccggagaagaacgacggtatgtcaaacccgtcggagttcctgtaggtgtacatcaccgctatcacagcagcaggtggaaacaccgctgtgatggcgacatattttcatgtcgccttgtctgggcctgcccggacttggctcatgaacctcgccccagggtcaatctactcctgggaagagctctgcgcacggttcgttgcgaacttcgccagcgcttaccagcaacacagtgtggaggcccacctccatgcagtgaggcaggagcccggggagactctccggacgttatctcccgcttcaccaaggtgcgaggtactatacctcgcatttccgatgcttccatcatcacggccttccgttagagagtacgtgatgagaaaatgttggagaagttggccacgcatgacgtggaaactgtccccactctcttcgctctgaccgacaagtgcgccagagccgccgagggccgtgcatggcactcggccccgcagaccggggttacccagacgggtggctcgggtaccatcccccaggacggtaagaagaaaaagaagaaggaccgcgaccaccagaagccgcggtccaccgccctagtcgtcgcagccgcgactgggggccggggcgaccgcaacaaacgcccacggccgcagaggggtaacagcggctcatgccctgtgcaccccaacggtcgccacagcgccgcggagtgtcgcgagatcatcgacctcgcaaaacgcgtcagcgagcggcgcgagcagtcttctaaggacggctccccacctcgtcgccgacctggcaaggaaagggtcgacgacggcgaggtggccgcggctgaacaggacctcgggtatcagtcacccgagggggacctgaaggatgtcttcgccggagactcctactccggtggcgacaactagatagacccccggagggaccccgtactccctggtctacggggctgaagcctgccttcccccggaaacccttctggactctccactggtccaggcttctgacaagtccatgcagaaatggctaccgcacaaggacgaggactccgtcatcaaacgcagatgggaacccagggtcgggacctagtcctacggcaagtaccaaaaccaagaagggctccgcaactcgcccccagctaggaaggacccttcaaggtgacaggaatacgtcgacccgggggtgactatcttgttgcgactgaaggagtacctcttcctgaccactggagcatctctgtaagttctatccataggagcaagtctgaggggtcgaattttttttcccttttgtaactaggtaacgcatacgtgtacgccagcccggtgaggtctgccctcataagctcggcctgttggtctgcacccatgcatgacaggttataaagaaaagatttaccctctcagatgtgcctccatgatagttttatcctactgctccatggtcctaccttacagttttccggatgttattttatctaacccacccaagcagttcccattccattagacatgatgacatccgaattgaacagccaggcttgcagtttaggacctctctgcgaaagcaggagggcccgacagcctgggggccggttctaaagaacgggagcccgttccatggggtggtccggagcctgtgtggccgcttagcctggtcccgtacccgaaagcctgcacactccaccactccgtgacgggtaccctagtacttggagctataagtcctgtgggtccggcaacctggggtccggaactagagaatgaacacttgtctcctggggtggtccggagccgtgtagccgctcagcctggtcccgtaccgtgggcctgcacgctccaccactctgtgacgggtgtcctagtatctagaaccaccatccagggggtccgtacgcacaacttggcttcctagactagaccctgcaggttccgagcatgtatcaaaggatggctagtgtcagatgacgggccctgcgggtgtactactaatgctccctagccgaagctgtgtgcaggcctaggtcccagtcgaggctacctcctaggggccattgccaactctttcttaggtatgctggtctacagcctcgacaagtcgagcctacatcccaggggggccaggtaccaaggaggaattggttacaccacacacaacagggacaagtggtacacagataagtgctaatactgcttgataaatagtactcaaaagtaccttacaaaaagcaaaagtattacatccgccttcaagcggagtcctagctccatctctactctacaggtatgaactacctccacaccggtagggtcgcgtgggtagctagctccgagcgactcgccagcggcggcgaccacctctgcaccgggcagcctcaccagtggcggcggccacctctgcaccgacggctcgccagcggaggcgaccacctctgcaccgacggctcgccagcggcggcggccacctctgctccgagcggctcgccagtggaggcgaccacctctgcgccgggcagcctccccagcggtggcgaccacctcagcgtgcgcgccatggcaaagaggccctcgcccccgccctcctacgggggtgaggacaagaccatccaagccatggagctgggagcacggcggcaggcggtgcttgcggtctggccgggaccgcgtagccgaagtttgcctccttcacaaggctggtgatcatccttttcctccgaatgctggaggaagaggcgggtcaccagcccatatgggaggcggagccgcggctcagctcgctctccaccaccgcgaggttgatgaacatccttgaagccaagcaccggtggaagagcgccgctcccacaaggccgcacacctccagcagaggaaagacaagaccggcagcaccaacccgctggggaggacaaaaggcacgaactctccaacggcaagttcaccagggtgtggcgccgacgcaaatccttccgccgaacgccggcgcatcccatccaagcaagcggtataccatgtcgagcactcactcagtctgggcatgctcgggatgaacttacaaagccatggcaaactacaacaacgcaaagcagagaccttgaaggcaaaggggcgcagagagctcggaggcgaaagggcaccgcgagtgggagagaagcaaggcatggctgctactcgagggatgaacccctctttaaaggcagcctcccccgctcccgcctcgatacgtcgcgagaagtctcccccgatgctcaccggggtatccatcttatgacacgggggcccggtgccacaagtcatacagctggtacgctggtcttcgagtgcgaagaaggcgaaccgccgcacaagaagcgtgctaccgcccccgcggtagtgcgcccccttcatcttcgccacgaccaacggtcaagaaggtgaaccgccgcacaaggagcgtgctaccgtcccacggtagtgcgccccctcgtcttcgccgcaaccagcggtccaacctctggcatgggggcccaggcccacatgtcatgcacctagcgcgccagattctgtgtgcggagaaggagaaccgacgcgtgaagagcgcgccactgcctgcggtagtgcgcctcttcgcccccgccgaaaccgacagcccagtctctggcacgggggcctaggcccacgagtcatcctccttgggcgccggtccctgcgtacagagaagtcgaaccaccgctcgcaccaataccgcgcctccttggggctgccgtagaagacagtaaaggtgaaatttcaaaatcaacgcagcggtaccgaggcaccccgcgcgtggcccagtaaaaccatcgagtgcggaggtcacgggccagttagccgcgggaataggcatggtggttgacgtgactgaaggcggactgacaataattatgtcagcaagcgcacggaagcggcgcgccaatcgccgatcaagctttggccccaactgtaggcttgtaccctcccctgaggcgggtccgggggccactgtcggtaccctgaatcaggggtaccccttactacagcattaaagacacggtgcccgcgcaactatccctagttgcgcgggaaaacaacacccaaccttttcgcatgggcagctccggggctgccacgtggccggaaaaggtggtatactccaggataccctcagtaggtccggacctcctcaagaaggcaccggacccctatactcactacctggatctccgagtatggcccagggctcccatgcaagcatgccggaccccttgggtgaggcccggacccctctgagcggggtccaggccacccacagcgaggtcccggggcaggggataccctggcctaagtaagggtccggtactgacacgtgtccagactttatcctgtgcgcttgcgctccccgctcaggcggagacccgatgctgccacgtggcttgttgcccgtgacgtaagccagcgggcggagcctgacgtaaggcctctgggccgcgcggtctctgcatttattgcggagaggacgcgccgcctgcccactctgctgacaggcgatgtgccgcctcggcatttattgtgacctgtccactcagctggcagcggcgtccaggccatcctgcaggcggcgtgcctgtccagtccattgccaaacagtacgctcgtgctgcaaggtgcattgtgtccaccattgcttatgcattgccagggaagcttcccctgcacgccaataccacgcagatcgcggatgtcagggtacaagaagattgctccagcaactccaagtattacaaccattatatttctgggcccacatgtcggggctcagcacctttgtacgcgcccccccttgagctataaaaggggaggcatgcaacgttacaaagggagactcaagcacacttagacctagctcaggctcacaagttcaaacaagctcaatacattacacagtggagtagggtgttacgctctggcggcccgaaccactctaaaactcttgcgtgttcttgagttcatcgttcatctaccaacaggcaaaacgcttaagccccctcctcatcttaggattagggcgggtgcattccaccacccggccggagatttccctctccgacaatgtcattcaaccaacttctatttgctagagctgtatggacagttctactgttttgaattcgcattgtcacagccgccagcagtctgggagcaatgtccttcacatttcttccctgtatccatctatcttcccagaaaagtgtcgaacatccattgccaatttccgtgtggatggcagcatggaagaaggatttcacctttgaaggaaaatgcattggagccctgcccaaggtttacaggctccactttagccatccataaccatctcattctcagagcccatcctagctccttaaggctgaaaatgtctaggcctccaaactcaattggccctgcacactcttccccaagccaccagacagtgtccccctctgacttcttttcttccacgccaaaggaattcttttctaatttatcaatatccttgagagctcttggaggtaagtccaccgtcattgcaaggtagat

SEQ ID NO: 160 - DNA, 3515 bp, Zea mays
  source 1..3515: mol_type = genomic DNA
ctgcgccaagtgccgccgccgggcatcccatccacctcccgtcctactccctgaaggcatgaacccccgttccaagcgccctataccgccgccatctcccgttcccctttcctttgttctctttcgtctgctgggcaaaccaacgccgccagccactggtcgatcacttccagccaaggagtggcggacgcgcagggcttggagtgtggcggacaggcggatcctgtagcggcagagacaggtacggacgagagaggtgagttctccgcacgatcggctgggacaggggaacgacgcgcgcaactgtgtggcctgggggggcattaaacgcttaaacggcgatcaatcgtcgcttaatcgattgctgtcgggtactcctggcactcagaagaggttgaactaagatagggatattcaatgacgggtggatcgggtgtggtggtgatagacaatgggggtggtcttctcaaggctggctttgggggggacaatgatccaattgctgttgtccccaactgtatggccaaaccccctggtggcaatgccagctcgaagaaatggcttgtggctgaccagctgcaggcagaagatgtcgatgtgactggcatgactttgaagcgtcctattgaccgtggctatcttatcaataccgaggtgcagagggatgtgtgggaacgggttttgcgcaatcttctccaggttgatcctactaactcgtccttgttactggtggaacccatgtttaaccctccagcgatacagcatgcaactgatgagctagtgttcgaggagtttggcttcaactcgctttatgttgcagatggtccttcccttgtccacctttatgaggctagccgacaaccaatgatgtttcgtgcccaatgcagccttgttgttgactgtggcttctctttcacccatgcatcccctgtacttcagaactttactcttaattatggtgttcggcgtatggaccttggcggcaaggcccttacaaactatctcaaggagctcgtctcataccgttcccttaatgttatggatgaaactctcctcattgatgatgcaaaggaaaagctatgttttgtctcgcttgatgtccctggtgatctacaccttgccaggtcagctgtcttcataacctttcatgtgccaacccttcttttgtttgtttagggttaatgtttcatgtaagttctgaataaatttaaaggttgggccatctaggaacatctagtgtttgaactttgtctgtttaaccaatttaagtgcacacattgataaccttttttgacaaactggattttgtagcttccagaactagaggtgttgtgcatgcacacatgtttttgtgggagctggtgaactagcattttgagctgaaacttcactataggcattagaaggcttgaaagaccttagcatttgaattttaagaacacaaaacttatctttgtcaaacaaacaaatagataactaacctaaggacactggaatgtgtttttgggactatcctatacttgggacttttgttttctcatattgttgtttatagtgtcttcgtaaagcaccctgaatttacaatgctaactccagaatccagatgccattaatgtcgacggatgctaagagaatgttattaagtacatgtttcctttgcttgaaagttgtttagaggcattttcttaaaatatattgtgctgtattagggaagaaagaatgagttaaatgatgtaaaatcacattcctttgaaatggggacctactaatgagttgactaaactatgggattttatgctactcaaatctcttagcagcttgctgtgcaatttctgggcaggttatcatttaaggataacccttttagatgttcttatattctccctgatggtataacatacaagaaagggtttgtcaaggatatggatgaagcacttagatatcgcaccctgcctcaagtatcagatagcaaagaccatggtatggatacaaataagtccgaggatcggaaaaaggcagaattaagtcaaaatgtaacatcctcgcctccttggtattggctgccatgtggtattatgatatcattgatgagattttaactctgtaggaatttgtcttgacaaacgagaggttccttgtcccagagatgctttttcatcccattgatcttggttagtgacaatgttatgtcctgtgtacttttgctcataagattttgaatatattctctcatatgtgctctcaagttattgaacagcatatcggtctcatgctacttttcagtgtatttcctaaaaccattgcaaagcacaataattatttcttcccatctgcacatgaccaaccaccaattcattttcctgatggggaggatttgcccttaacattggaatgcaaaaccattgacatacctaatctcaattactagtttactactcggataatatcccttgccagtgactcaaaagtagcaattcagttgaccttcataacttcatatgcatattaatcacatcttggtgaatttacatcaactattctgtttttcctttaacattggtaaacaatagaacagaagagtttcattgttttgtccatctttcttccgcacagtagtaatgttagtttcataacaattgtactctgctatgttagcacattatctaagcttctcatttgttgccatactaatctctgctgtgcatatttgtaggcataaatcaagctgggcttgctgagtgtatagttcgtgctgtacaagcttgccatccatatcttcaacctgtgctttttgagaggtatcatttccatttacatacatctgcacctgcattgatctttgaacatggtatgcatgtgagttcacattgttgggatgtttccagcatcatcttgacaggtggaagcacactgttccccagattcaccgaaagattgtaagttgtttctttagcattatagacagtatatgcctttattttgtcatgagttggatacacttgttatttggtttcttttgaggtagtcactgagattgcataaactgcattgacagggagagggaacttcggcctcttgtccctgacgactacaaggttaagataactcgtcaagagaagtatgtctctcgcaccccctcttgcatgcccaattttattggtggaaaatgctgaaaaatgaatcataccgtgcatatgattggcattgctgttaacaattgtttgctatgtgtagcccaatttttggtgtctggagaggcggatctattctagcatcaagtcctgatttcgaatcaatgtgcataacgaagtctgagtacgaggagatgggatcagcacggtgccgacgaaggttttttcactgaacagaatactgagtttttggcgaagtagcttcagtgtaggtcaatcgcttaggagaagcgagtcttgtttgtaaatactggtgttgcatgtatttagtccagatgtttgacagtttggtggtatatgaattagaagtccggttaacagtaa

SEQ ID NO: 161 - DNA, 9318 bp, Zea mays
  source 1..9318: mol_type = genomic DNA
gaggcgaggcgccgaggccaggtgaagcatccgaacggtcccgaagaaagacgactcagcagtcagcacaaggacaaggttaccaaacgctccaagtccaaacccctctcctcccccgcgtcccgcgagctccgtcaccgccgccgctggcgagatgtcatcggtgacccgccctcagcgggaggccgactttgcacgcttcccgtcgtccacccccatcgtcatcgacaacggcgcttctaccttccgcatcgggtacgagctcctgccgcgccgggcactccccaaacccaaaccctagctgggccttccagttttctgtaaagtggcggttgcctccgtgcaggtgggcgggcgaggcggagccgcgcctttcgttccgcaatgtcgtgcagaggccgcgccaccgcagcactggtacgccgccttacactgcggagaatgttatttcgtgttaatttggtggttgaaggctgcatggaaatgtggattttctgttctcgtgtttgcttagttgctccttgctgttcggtttcagaacttgagtccgcagtttcccgctagtgggaattttagtttactcttaaaaatcgttattatcgtgggggattaagagtgtttactcttttctttgttgtttatgtgccttgtgcgacactacgttgatcatttgggacggttatagagtttgatttccaataccactaagctgatttccatttgtttgtgtgacttcactattgtctacatgcactaattctgtggtagtgcacgggaattggatacaaattgaaattttagttttctgcatatctgcatagactcgataggattttgttttatgatcctatgttacttacttttatctgtttcatgtacttgtgctacaagtaatcctacaaaatgttctaaagaccagatatctctactgttatcattgtgtttgctgagagctctgtaagcttcatattgttttgaatgattatatgtaaggaacagaaatttaccttttcaaggtctcaaccctcatgtatgtgttaatcaacagacttgcaagaggtttaatggaagtttcattattcaactcattgtattctaatttccacggtacaggtgaaactgtctcaattgttggggacactgacccatctctaatgaaattctttgactgcacaagatcggcagttcgctctccatttgacgatgatgttgtctatcagttcgagtacatggaatatgtttgttctcagacaccatccaccagtttttagttctcagtagatatatagatggttctttgttattcatatttaattttgaagatagataaaccagtgatcaatctgtttcatcacccttctgtagaacacattaaaacaactacattattgataaatcacattagacgtttaacgttttaattaggaaaaaaaccactaaagtactaccatggtttttaaagcggtaaggcgagccaaggcgttggaccaccgcctggacgccgaggcgacgcctaggcgaggtaggcgggcaaggcgcctaggtgttggacctccgcctggacgcctaggcgacgccttaagaacagggagtactacatgtgttaactgatattttttatgtccataatccattgttgaaacattatggtaaaagacattgtcaaagcaaaatagtgaaataccccctaaactgttttatattgagtaattgctccattattagccaagtgatcatccatctcatgattcggatggtcccctgtaatggcagtaaatgcaaattgtaatcttacaactcaaagatataaagaaaacatgtgatttcttatttttctggatcataatgtttacactctagggtcgtagggcatattcctttttcccttgcttttgttctttttttttcttgtctgatacagtgttatttatcgatttcagattcttgactatggctttgatcgattaggtgtcgattcagaggtaaatttgcactgtcctaggtttctttccaaaataatttatattttttcttctcttgttgttgaactattgcattcgatacataagaaaaatgctggtttagctagtcttgttgaatcacaagagaattgggttgtttatgtatgatgtaataaactatcagttcagtgtgtgtaatgaatctgatgataatgggttatctcgagatgcagatcttagagttcttatattgtacagagttcatcaatagaaattttcaagtcagtagagtgtcctaatatttccaggaggaacttgagctgcagcctttcataaaggcgaggcaaatgaaatgacaataaatgagtggtattgagctactttactttaacccgatcgaggtggtattgagctactttacgaacgaggtggttgtggttacagaagactgaacccgagcggccatggaccctttttcctattaagctgcataaatcggtgcactctttcctttctatggctgttgaaactgtggtcgggaatgagaagcagactctgttttggaaggacaggtggctgcatgggcggtgcttagaggacctggcaccaaaaatctttgccttggtgcctaaaagaagaattaatcgacgcacagttcatgaagccttattaaatcacgagtgagttaaggatatacagggatccctatccgtggaggtgctcttggagttcctggatctggcagaatgtttagctaattttgagctgcagccggatgtcttggattctcacatctggaggctttccccttccggtcaatactcaagtaaatcggcgtgtgaaaatttcttccaaggctcaatttctttcagcccttgggagcgtatttggaaatcatgggcacctaacaagtgtaaattcttcatctggctcgctgcccacaagagatgttggactgcagatcgactcgccaagagaaatttgccgcacccagccacctgtccattctgcgaccaagcggacgagactattgaccatgtgctgacaaattgtgtgtttgcccggcagttttggtttaatcttctggggcgcttcaacgtacaaattcttccaccattggctgaagatgagagcctgtagggttggtggagcagagaaagcttgagagttcatgatctggcccaaagaggttttagttccctagttatcctaggtgcttggatcctatggaagcatcgtaatttgtgcgtgttcgaaggtgctgcgcctaatttggctagggccctgctccttgctgaagaagaggcttacttgtgggtgttggccagggctcgggggatttccttcctttcagccctagagcctgttgagtaatgtagctgcccttggtcgtttttttctggtgtagcacgtgcgtgtttgtttgtctaagtgttagctagtgctgttagtgtgtgggttgtactcggggttctcaaacccctttccttctttaatataatgatacacaactctcccgtgttcgagaaaaaaaactactttactttaaatacaaaatgagcatgggttgtcaagttaactatgctgttaagtttgtcctccttaccagtccatggtaccaaaacataaacaaggaagagttggcttcctatttcagcacttccatcttcccatagtgtaattgttgcacattgcttcagttatgttaattcgcatcagacatgcagacacttagggggtgtttgagagtgaagtttttccacagttttggaagaatactgcagcattctcaaaaattgcagtattacatacagaatggtgtttggcaagctagctaaagtctctgttttcaaaactgaaatattgcaaatactttagttgttttaaggtattctaaactaaggtctggacctcggtttctaaaattgtagtatttaaaactgtggtattgtcatgattgaagtgtactgtagtatttcaaaaactgtggtttccaaaaactttgttcccaaacagggctatgttatctgttcgtatatatcctataccagaaattcatgccttctctttcttcaaccaaactgttattcggctgagtgttgttgaaagctaacaatgatgctcaacactcgacaggtgggccatccaattcttatgacagaatgtgaatgtaatccgtccttttctcgagcccgaatgtcagaactacttttcgagacatatggtgtaccatccataggtaataatttctctgatcttgatgttatgagctgcatatagttatatggcattagttactttatcataagttttgcaatgctgatgctgctgctttctatctgatatgtagcatttggcattgacaacgcgtttagttataagtacaatcagaaacttggaaactgtaacgaagacgggctggctatttcatgtgaacatggaacttgtcatgttgttccagtaagttcttgtcccgaagatacacctctctccaactttcaccagatataaaatgtttgcctgattttgtcttccatccagtaatataaatgcagtgcatatgtgttttcaatattgcacttcatgtttaataatatttaacaactagaattctatctattgatgaaggacaggcctggcgcagtggtgagaagccttcccactgagccaaaggtcctgtgttcaatgcagcctctctacaaaatgcaagggcaaggcttgcctcggctattccttccccagaccccactcatgcgggagccgctagcattgggtctatcctttttagaattgtatctattgataattctgtggtaaaaaaaaagggaactaccactgctgaagactactttcacatgcagctacagctacagcatatttttattgatatccaaagatgctatcattatccatgtttctaagggaaattgttcactgatactgttagagtgctgtataggagttacatgtttgcccctttttaatgggctttggcccacttgactctatataatacacacccaacccctggattagggttagggtttcatcatttccaacttggtaccagagccaattgtctcttccctccctcccaccccacagccgacgacctccttctcccacctctgccacagccctgccccctcccctatagccgccatggcttgctttcccttcctccccggcgtgtcctcccccctgcttcatcccgacgtgtcctcccccttgctcttgccactaccaccacctccaccatttggcatcgtcgtctcggtcaccctggacatgacgtgatgtcctagctctccagctgctcagatatctcttgtagtcggggctcctctgagcgcctctgtcatgcctgccagctcggccgtcattctcaccttcccttttccatttccatgtccagggttgctcaggcctttggtcttctctcattttctctggaatttccctctgtggctcaagtccgacaactttcccaccctcacccacttcttcgcttcatcgcttgggtgtctacccagttccgtcgtctggttcatgcactacagtgcgatcacgaccgcaagttcgacaacttcgcctctcgatccttctttctctcccacaacttcagttgcgcctctcacacccctacacttcccctcaaaacggctgggccgaacggattatccgcaccactaccaacatgatccgtcgtctcctctttcaggcgtctcttcctgcccttcaaggcgatgagtcaccctaaccctaatccaggggttgggtgtgtattatatagagtcaagtgcgccaaagcccattacaaaggggcaaacatgtaactcctatacaacacactaacagatactcctagctgaacaactttagtcaagcttgccttaatctagtgtgatatcacatgtagttttgggaaaaaatattatttcagtttttgttgggttcgacatatggaatgtctcatgttaaattcatcgttgagcgaaagggcctctagttgagttgattagatggtctgagtagcactccttaggtcctgagttcgaatcccagtgagagcgaatttcaggctgaggtaaaaaaaggtcactcactggttcccctggttgtgtacacatgagagattgacttgacctatgggggcagatccttgtgtaggggttgggagggctcaaagcacgagtaaagatccgatatatagggggcggaccctcatgctgcacggggggccagctttcatgacctttctcggtcggggctctgattgagcttcttcttaatataataccgtgggggcggtctttcccctaccgaccgagtttttttaacttcatcgttgagtgcatgaaccacaatttggattttgctacttggtcatggacatggtcctgtagtagtcaataatgaaaagaaaactcaactagaatcattaaagtatttttgtgaaataaaatctccttgaaactggctttctcccctgtgtatttcaaattaaattgtatatttctaaactaaaagccttgtttgatctggtttttcagtttttgaaaggacagcctgtgttgggggcttgctgcagaaccaatatcggtggatttcacattactgattttctgaggcagcttctctgtctaaaatatccctatcacacgtaggtgatagaagtatatttctggagtattcatagtgtttgtttttcctaccatgtaacagtaccattttacattgaacagggcaagtatttcatgggaaaaggctgaagagctgaagaaggaacattgttatatagctcctgattatatggcagagttgcagatatttaaagtaataacttgtatatattttttctgttcttatacaaagctttgaattcttgcattatttttttgaatgaatttgtatagggtgcatagagctttctataggatttgatgaatcgttgtgcttgtacttgtgatggtgattctcttcttccaaaagtatattagttatatgttttctctgttactgaacattcttgtaacacaatcgattgatcacttgatgctgcagaacaataaggaagaagctgatgagaaaatgaggtattggcagctaccatgggtccccccaccaaaggaagaaccaccatctgaggaagaacttgcaaggaaagcagctttgaaggaaaaggctggtcagcgtttgcgagacatggctgctgcaaagagatctcagaagatagtggaactagaaaaacaactttcctatctggaggaactaatggaacaacttgatgaagctgaggaagaagaagcaacagctattctaggtagctctggatatctttcccagcaggaaatcagatctgccattttaaaagcatcacaatctttaaggaaagcaaaaggggagtccaatggcaatgatgagaaaacagatgcctcagcagttgataagtatccacttgtatctgttcctgatgagacactgacgccagaacaggtgtgtgtttgttcagttattatctacagaattctattcatgtgcttctaacatctggatattgtgtgtatattgtagatacatactcttaaatttacattacataccctggaatctctgaccattgttgcattccatttttgtatattttattttaccagttaaaggaaaagaagaaacagatattacttaaaaccacaacagagggcaaattgcgcgcaaagcagaaacgtgctgaagaggaggctttgcgggagaaacaagaagaaaagaggcgtgcgtaagttgtgatgtaaccagtttgaaatttatcttccttatatgctttcttataagatactcctattattccatgtcttgttaattttcagtattagttatctcaaagccactttaccaagttccttctttagatactaccccttgtggatcaatgtccaaatataggacacaactacactgtattttgccataccaaatagtgattaccctttataaattgtatttccaagcatgtttttaatcttgcataaggtaaggccctgtgtttttttaagagaaaaagtctgagccctgttgctgcattgaacaggaaaagagaatgtggctgtgcaactatgtattatgtctctacaattctgtatgaatggtctacctcatgtttagataaacgatctcaaatcttttttacaatatttgccaggcgttctattctatactactatcgtaaactgtttcattcaactatgtagggagaacccagagttataccttgaagagcttcgggcccgatattcagaactttctgataaatttgagcagaggaagcgacagaaagttaatggtagtcagacaaatgggaaccatagttcatctgcaggtgtaggccgtggagaaagactaaatgcagctcagaaagaaaggatgcggctgcttgcctcagctgcttttgatcggggcaaaggtgaggacacttttggaatgagagacgaggattggttagtgtacaacaagatgagcaaagacaatgatgatgacagcaatgatgatgatgaatcggaacttgttcgaatttcatcgaagctccaggtaaagtccctgcttcaagatttccttctggtggtgaaaattgtatcctatcttagtttcatttcagatgtcagcaatttcagctataatcaggtaccatttgatgttccacggtgcaggagattgatcctacatttgtgtccaaatccgaagctgttcaactgactccggagccacccaaagtccggccactaaccgctgaggattacagaattgccattgggatcgagcggttccgttgccctgaagtcctcttccagccaggcatgattggaatcgaccaggccggcatcgatgagatggtcagcatctcactcaggagattaatggaggacgagtctgtgaaggagcgcctctgccagtcgatccttgtcactggcgggagctccctgttccctggcatgatccctcggctggagtctgggatacggcaatatcggccctaccttgctcccctgaagcttgtcggagcagctgaccccattttagacgcgtggaggggtgctgccgcctttgcggcatcaagcaagttcggcaaacaaacgttcagcctagctgattacggagagcatggagagaacctgtttcatcggtacaacattgtttactcactataaccggaaaatgacatagtgatcgaaccatctcagtcaggctatttatttaacagctgatacaaattgatgtagcaacaaagtttttcaaaactgcaattgatatttttatgtgattggaattggagggttcaaatggtgaaggaatttcataaacc

SEQ ID NO: 162 - DNA, 6925 bp, Glycine max
  source 1..6925: mol_type = genomic DNA
caagctttgaaaacataaagaccaatttaagagtaagcacgagaagaaaatagaaatctaaagatcacaacgagttcctattacatgcgaaatatccgaaacagcaaaaagactagttttgaatatccgaagcagagtaaataagaagttatttagtgagtgttgtgttgtcgagtgaataaaggaacgaactaaggcatcgttttcatttttgttttttgttttttgttttttgaaaaagggtcttccccgccaccaaaccctagctagcgctggaaaaatgccgagggaaatcatcactctccaggttggccaatgtgggaatcagatcggcatggagttctggaagcagctctgcctcgaacacggcatcagcaaagaaggcatcctcgaagacttcgccactcaggtttcataatttctacctaggtttcaaagggaatgtttatcattttcattcttagtgtcccaggttgttggatattcactcaatttccccctctttgcatgccccttttcttgttacggaatggtttcaaaggattatttctgcatttgctgctgcaggggggtgaccgtaaagacgtgttcttctaccaagctgatgaccagcattatataccacgggctctcctgattgacttggagccaagagtgattaatggaattcaaaatagtgactaccgaaatctctacaatcatgagaacatctttgtctcagatcacggaggtggtgctggaaacaattgggccagtggatacgatcaggtttgtcactacttgctaaagcattttgtaattaacatttatttgtctaccattggttgactttgtttgtgtctttgttacttccatgaatcttctctatacttcagtaataaattattgtaaacttgtatcatggtcatccaggtccctgattttttgaagttgcaaaatctattcgtgcactttccaatgtaaatttgtgatatggattaatttaggcatacatttttcaataacatctaatggttcaaattcaatactagccaacttcaaactaaacagacactaactcatgctcatgtcatgccactacatggagaagattttgtactttggtgcagtgccattgatgcagtggtcaatgtagacaagtgacaccacaaaactagtgatgagttttttccccacattttatgttactgatgatgatcctgcaatgttgggcaacatgcccttataattgatgtctataaatggctctggtatttattgaagcactggcactagataatcttttaaaaatattgcttcacaaatcatgtaaagtcacaggccaaacatctatatgtgctcaatatttatttgttttctagaactagagatgcctcggatggtttggcctgatattggcaaccttctaatacttaagcagttctatgcagaagcagcagaacttgatttatgcttttcaaatgactttacaagtgataatcctgacaatttgctccatggaatcattatcgacttttttgaaacataaaggaagtcttaatgggcaatatgctataagtggtaaagtcattgtttaactaatgtggttgttaataactggccagggacaacatgttgaagaagaaataatggacatgattgacagagaagcagatggcagtgacagtcttgagggttttgttctatgtcattcaattgcaggaggaacaggctcaggtgtctttatcacatctttgccttaaaacatcctatcagtttcttcaatttcctctcttcctaattgagcatttgtttaatgggtgtatctgaaaaacatagaggattgctgacatgatcgtctaaatttttcacctgattcatacccttagtttcaactaaaacattaaattgtacccttacgagagaaaattgaacaggattgcaccttttagcgtatgtcagcctaaaattgcttataatacagtggtggggattcctatttgcctttgaaattgctacgtataagatgaaattttttggagatttctccagtattattttttaatttctcgtgtattaaatatatttccttacttttatgaaggtatgggctcatacttgttggagactctgaatgaccgctacagcaaaaaactggttcagacatacagtgtgtttcctaaccaaatggagactagtgatgtggtggtccaaccatacaattcacttttaacactcaagagattgacacttaatgcagattgtgttgtagttcttgacaatactgcactaaatagaattgctgtggaacggcttcatttatcaaatccatcatttgctcaaacaaattccttagtttctacagttatgtctgccagcacaacaactcttcgttatccagggtacatgaataatgacttggttggtcttcttgcctctttgattccaacaccaagatgccattttctaatgacaggctatacacctttgactgtggaacgccaggtgagatcattgtgtcattttttcccccgaaagaatgattttggagcatcaaagcttttccataaatttgtgtcttcacttgtgaatatttctgttggtaaattgttgaactggaaggcatcagtggggaaattatgaattcatctcactttcttccccccatttttaacttctgtaatctgattgggaaatgcacacattgctaaaaaatgtgatttttcctgtaacacttccagataattattgaaaattttgatgttatttccttgcaggctaatttaattcgtaagactactgtacttgatgttatgagaagacttctgcaggtataatgactgcctaaacagataagcattcaaattgaatgcctttgtgctctactgacaggtatgttcctggcaggcaaagaatattatggtctcttcttatgctcggacaaaagatgctagccaagcaaaatatatatcaattctgaatatcatccaaggagaggttgatccaactcaggtaattagaaatagttacgcagtatttttgaaataggaggcctgcctttgggacagcaagtgtatttctgtatttgtgaaataggagactttttgtctctgggacaacaagtgtattgctttattttgtgatttcagtgttaaatattatcttttatttactcttatcaattggtgttctgtcatgctgtcacataaaatctttagcactatactttaatgaaaaaaaaccttgaaaaattaaaagaagtatttctttcaactaaaattaaattaaccttcctctgatgctggcagcttttctagttttttttactgctatttgtaatgttataaagttttcatcatgttgcagcttgcccagattgacttgtgatcgtgaagtatcatgtttcttgtatgaaaatattttaagagttctattatactatgtcatgattttgtctttctctatggatttaggttcatgaaagtttgcagaggattcgtgaaagaaaactagttaactttattgagtggggtcctgcaagtattcaggtctgcattctgtggcaaaacaaattaaagtggcagctggtgaatttgtctcctttatattagttttaggactcaatctgatctttcttctttcctaggttgctctatcaaggaagtctccttatgttcaaactgcacatagggtgggactctcatcatttttctttcagtctttcttttgatgattatcttacttttctgcttttttttttatctgattatattggagatagatcaactcacatacacacacaaacactcatattgattaaaatgatttttgttctgaggttaaaaatcaagaaattgggttatgaaataacctattggtgctgcatttggtaggtcagtggccttatgctggcaagtcatactagcatccgtcaccttttcagtaaaacattgagccagtatgagaagttgagaaagaaacaagcctttatagacgcctacaggaagtttcctatgtttgctgtaagtgtgatagtttcatatggatatctgatatctatctgcatttgttatatacttctttggcctgtagcatcttcatgtaatacctgtcatttcatgtgatgacatcaataaaaaatggacaggataatgacctctcagaatttgatgaatcaagggacataattgagactttggttgatgaatacaaggcctgtgagtccccagattatatcaaatggggaatggaggtagattctctacaaatcccttgtaccattttaagcacatattgcgtattgctaattttttgctctcttatttaggatccaaacaacatgctaacaggagaaggcaatgctacaggatcattggatccaaattcagtagcgtgaaaaaaccaagtaagctacgattaggccttaatttaggctttaagtttctggatttgattttactttttttctctaacaagataaataagatatcgacttgttataagtttgaattatcattttttaacatgtgaatatctattgttgtattatttttctccttgtgactagggatgttaacgaggcagggcggggagtactcccccgctccccgtccccactccccaactaaccaccccgtccctgatccctgctgtgggggatttttttcccctgtccccatccccgtggatccccacagtcctcacgggccccgaaatttacaaaagaaacatgacggcgacgatgaccatttgatggtgacagtttccttctttttcttttttgttctctctcgcttcctcgcgctctatacgtcaccatggagagttgtcacgacgatgacgttacaatagatatctcctcttatttacatcgtgcattccccaaaatgatacccatcgatgtcgtgctgcaatggcacaatcttctttcttcactcccattctatccctatgtcgggatgagctgccgcgatgacaatgcctctgcgcggctctcttccccttttccatctcggcttacctccatctcatgcttcgtggtggtgcttccattgcaacaatacctgccactgtccaccaccgctgtgccgtgactgcacagctcccctccaagacctagctgcgcttatcagagaaagggtattttttctattgattgtattttcctcagggcagggggtgtgatccccgtccctatcccgctgcgctcgcaggagaatatttatcctcgtgcccatggggaatatttatcctcatcctccccactaggaaaaaatctccgtctgcgggcccaatacaagacagtccccacagcgatcccggtgtgcgggtctaaattgacactcctacttgtgtaatgtgactttactgttatttagcacttattttttaaaattctctaattattgattgctttataatgttctttttgcattaaattttttgtacttcaaatctccacttaaattaatttctttaattttttatattaaaagatactttttcatcttaaaaattaaatacttattgtttcaattttttttaaaaaaaataatcttttccctctaaatataaactaatatttttttttgtttatttaaactaattatgcatatttttcttataattttgaatatttttgttaaaaattacatatgcaaaatgcacatgatatttgctagttgataggaaaaaaaatgaagattgaaattgaatgttaaacgtggttaccttacatttaacaccatttatttacgttcaatcagccaggagcaatattttggtttgctttccttcttgaaatgtctttaccctgtgtgaagtgtgaacttagtgtttgattctgagtatacaagtacgctgtcttttgagtctatttcccataaaaaataaaactttcttttccgtgttattttgtctaatcaatctgccttctcccatctatcgatcttttctttcctcttctgccgtgggttatggaatcaaatactatcctgatggctgaccaaaaaaaaaaatactatcatgatgattatgtgtgcatattaaattttatataattttaccatataatataattatagatatttttaaaactatatattatatgttaaagtaaaattgtgcgatgatgtatcaattaatttttaatttatatgaatatttgtgcatttgatatatcttatgagatcttttaacacgcacccgttgaaaaattctagtggtttaatttaacagtctctattgtcctacacttggtaatcaatcatctgtttgaagtttggactaaaaaataggaattatattacaataaacaatttttaaatatattgagtttaaacttgaatatttgttcaactgacaatgaaactttatgctgtcagtgcacaagaaagggtcacatcaatgtagatttgtagtaactaatatttatcacttgaagtaaatctttttaagaatttcttaaattggtagaaccacatgatttagggataacatgaatctttaacactgttcgtaaatcggcaatttaatcccttgggaatcttgagtatttggtgggaaagtgacaaacctaaacaaatcattgcaggtaccacaaggaaagcataaaaaaggaaagggtttttctgaaagatcaacaaggtttcttttgaagtttttaacttttttggggtgtgagatggtttgcggtgtgattagttttgtttgtatttgtttgctaatcgtttgtgcccaagggaagggagattgagtacagaatctttctgtattgattcgtttttagcaatgtatatggttggttggtcattgaaatgtagagaattaggcaaacctagtttctttatctgtggatctgacgtgtttgttaggtgatattgctgtttggcatgaattgaaattgaaatatttaaatttaaattgatgtgggcatagatttacacga

SEQ ID NO: 163 - DNA, 2471 bp, Glycine max
  source 1..2471: mol_type = genomic DNA
caccgttaaaatattccatcaaacggcccagcgccttctgaggacaaagcgagggaacaaacgtgaaccgtggagtctcactataaaaatctcgctcactaactcttgttcttccaaaaccaattctctgcactcttcatcaagctccgctccaacacaggtacttcctctttcgtttcttctccggttctctctctctagatctagaattagaggttaattagttaattagtgattattaactagcaagttgtgtttgaaaatgcaggggaaaatgagggagatccttcacgtgcagggagggcaatgcgggaaccagatcggttccaagttctgggaagtggtgtgcgacgagcacggcatagatccgacggggaagtacgtcggaaactcagatctgcaactcgagcgcgtgaacgtctactacaatgaagcctcgtgcgggcgcttcgtgccacgcgcggtgctgatggacctggagcccggaaccatggacagcgtgcggaccgggccgtacgggcagatcttccgccccgacaacttcgtgttcgggcagtccggcgccggcaacaactgggctaaggggcactacaccgagggcgccgagctcatcgactccgtcctcgacgtcgtgcgtaaggaggccgagaactgcgactgcctccaggggttccaggtctgccactcgctcggcggcggaacgggctccgggatggggacgcttcttatttccaagatcagagaggagtatcctgacaggatgatgcttactttctccgtttttccttcgcccaaggtctccgacactgttgttgagccttataacgctactctctctgttcaccagttggtggagaatgctgatgagtgtatggtgctggataatgaggcgctctacgatatctgcttcaggactctcaagttgaccactcctagctgtaagttcatcagaaaccctaattgctgatctgattgttatattgtgtgtgcgtgtgtttagttatgattaattcttaagtaacaagtgtttagtttcataaaccgtaatttctgatctgattgttattgagtctctgtgtggttgaggtttctaaaaattgttttagaataaaaatgattttagttcaaattaatcttgaaaaaagtgtgtttagtttacatcatgaattgattttgactgtagtcaaacttgtttttataaaaatatatatatgtttgtttaaccacaattaattttacaaaatcaattttgtaatctctcgtccaaactcaacacatgtaatttatattttagatgtctttattctacaaacaagttattagtgttaaatattttattcactgcaaagattacttaaaattattttaattctaaataaattccttgatgtaaaactagacatgtaaacatttacttaaaatcattttatagtaggtagtgtttcaaacttcaaagtgattctggatatcaaacatggaatgatgatgtgtgaattgtgattgtttgtgttttgttgcagttggtgacttgaatcacttgatctccgcaaccatgagtggtgttacatgctgtcttcgtttccctggtcaactcaactctgatctgaggaaactggccgtgaatctcatccctttccctcgtctgcacttcttcatggttggatttgcgcctctcacctctcgtggctctcagcagtaccgtgcattgacagttccagagctgacacagcaaatgtgggatgccaagaatatgatgtgtgccgctgatcccaggcacgggcgttacctcacggcatcagccatgttccgtggcaagatgagcacgaaggaggtggatgagcagatgataaacgtgcagaacaaaaactcttcgtactttgtcgagtggattcccaacaatgtcaagtcgagtgtgtgtgacattgctcctagagggctctccatggcgtccacattcattggaaactcgacctcgattcaggagatgttcaggagggtgagcgagcagttcacggccatgtttaggaggaaggctttcttgcattggtacactggtgaaggcatggacgagatggagttcacggaggcagagagcaacatgaatgaccttgtgtctgagtaccagcagtaccaggacgccactgctgaggacgaaggggagtacgaggatgaggaggaagaggatggtgaagcagacgaccatatgtgaagagactaaaatgtgaagatgcctgtgtcttacttatgctatgtgatgcgtaagtgtgtttgctctgcactccaacgtgaagaagattgtaattactaatagtgtatgtacggtttgcgggataatactttgatggtagtgagagtggagtttgggacctttgggtacatgttatgcggcacctatcggtttgttcttatattggcttgctttttatttttatttttgtccatctggtatattggatctcatgtttccgtaa

SEQ ID NO: 164 - DNA, 5611 bp, Glycine max
  source 1..5611: mol_type = genomic DNA
tcagatgccaaatggtcggtgcccaattaatagtaatcaaaaccgttcaataatttgaggatttaatcaccggttaaactcagtgcttatggcatttggaacttcatgcactaattaagatttcccttaatagccacgttaagagaggaagggataaaataagagtttcttcttcttcttcttcttcttcttcttcttctttgatttctctgttttgcattcccatccaactagtaattactattagttttttttatgagtcttgtgattattgtttttcattagtatttttcgattgttaaacataactagaatcgtagaagaaaagagagacatagaatatgagagaaataataagcattcatattgggcaagctggaattcaggttggtaattcatgttgggagctatattgccttgaacatggcattcaacctgatggaacaatgcccaggtcttatatttttttcttctactccctacgtccctttttataagatattgttttctatatatttattgcattttaggcaattcttaaatactctcacctggccttcaatttttggttagaataatttttttttttggaaaaaattaattttgaaacataatgtagcaatttctttaaaattaatccaaggccaagatccaatttctatgtcacatgttacgttgatttactaggtgcaatatattctggggatacctacaagtttcttgattctttgggtgcgtttatgatcaatatattgcgattcaaatgcctgtacattgttatatatgattaacgtcgtgtcatgtcatgcatgcctgagctttgtattggatcattgtagcattagtgatcctttattttttgttagtatcaatcataggaaagcttcttttaatctattttcaacttttgcttccttaattttctcctttgatcattcctcggacttaattttttctgaaaaaagaattgcgttctattgttagtttttatgtttacatagtggggtcatttataggctgtgctttaaattaaagtatcaatcaacctagcacattacatgtttatttctaaattattacgtttctggtttatgtatcatgtattccattttatcattctatgatcatttttgtgaagtgtattaacatgaatttcaattaaatgcattgcgggctgcggcgatgtgcttccctcatggattgattaaaccttccctggatttggaaatctttgttaattatgtgataatgtagtaattgacatgtcaaaatcaattttgacaaatttatggccttaactcaaataaggaatttctttagctatctgctcttaggtgatgtaatatcattgcagatccatagaaaaggtgatctaaagtcatgtagttagctaagccatttcagtataatatagtccctttaattttttcatttccacacataaaaggtgcatcacttacaaggcattcaactcttaatttcatctttgtgccaaggtattgcttgtagctagtgatttgcactcaacttagaaacacagatagctaccaacttatagactaggtctatatatattccttccactttctatagttatgtttctgaaataactatgtttaaacttgcttttagaaaccttatgagtcaacactgtgggttcttataatttttttgttctgtttctgttgagtttcttattagctgatagctactccatttcctgccaccctttatttctttagtcacattaatacattttatgagcgcctttttattggcaatctttgaggcttcaaaagtggatccgctatactgcttttcttcacattagttgaagggttgaaatcaaatggttaattgttgcttcatttacctgtattttgtcatagaatataaagaatgaaacaaattggagctcaaatttgtaataaaatgatttttgttcccaccttttaagctttaattttctcattaacttaaaatcagaccttggttttctaacaaatactatgtaattgtttctccctttactttttttggcactgattcataatttcatgtacatgtgcttgcagtgatggttcaaatgatgcacatgatgctttcaacaccttcttcagtgaaattggaactggccaatatgtcccaagggcattatttgttgatctggagcctagtgtaattgatgaaataagatgtggtccttacaaacaactctttcatccagagcaattaatgtctggcaaggaagatgctgctaataactttgcaaggggacattacacaggtcagtcacttcctaaaaaaattgggtatgttctatctgacagtgtcacttatttggtgtctatatgctgcagttggaaaagaaattgaagagctgtgccttgaccgtatcaggaagttagccgacaattgcactggcttgcaaggattcttggttttcaatgctgttggtggtggcactggttctggcttggggtcattgcttttggaacgtttgtctgtagattatgggaagaagtcaaagcttggcttcatcatttatccttctcctcaggtgtagtaaaatgaaatctgtttgtggtggagcatcaaacatttgttgactttacaacatgctatgaccttttattccaatccttcagtatgaagaaaatctctagtggagaatattccagtaatgagaaatgctacaccctttaacaatttttgtgacattttctctccaattgagtgaaattcatgtgagttctattcctcatttactggggatcctaatcccaaactagtgggatgtacataaatttcaatcaataaaaaagaatgttttaagaagagtgttcgagactatgttattagcactcctctgtattagtacatgatgaaaattgcatatacattgcagtaatgttaacttccaacatatgatgttaaattgctagagatgctttcacatatgttgctctacacactttagaatattcttggcttccttaattgtgcttcttattgattatccacatttctatatcattataccaaattgtccgagtggaatgtccttactgtagtgttgttgttaacatgcaggtatctactgcagttgttgaaccatacaatactgttctttccaatcactctcttattgaacacagtgatgtagttgtgctcttggacaatgaagcaatatatgacatctgcagaagatcactagaattagaaaggccaaattacaccaacttgaaccgcttgatatctcaaatcatctcttctttaaccacttccttgagatttgatggtgcaatcaatgtggacatttctgagttccaaaccaaccttgtgccatatccgcgcatccatttcatgctttcttcttatgcccctgtgatatctgctgcgaaggcctaccatgagcagctgtcagtgcctgagatcaccagagctgtgtttgagccatcaagcatgatggtcaagtgtgatccaagacatggcaagtacatggcatgctgcctcatgtatcgtggggatgtttttccaaaagatgtaaaccttgctgtctcaaatatcaagacaaagagacaagttcaatttgttgactggtaactacacttccttggaagaacaacatcatactatgatatatatatatatagaatttggattgcatgatcttttcctgttctgttctttctgttgtggtcctaactatctgatcattagtatggactttccatagtcagtttttctagttccttctatatttttgccttttcttttgttttaaagattgagattatagaaaatagtaccaggaaaataagcgctgaactatcaatattaaacttatttgcatgacactcctgagtggtaaaagctgttgtttgattatgattttgacctgtttatgtgaaatcatgaaagttgtaactgctctgttttgattattgactgaaacatctcaacaaaatttaggaagagttgtcccaattttggggctctttttttcttgaaaggttcatggggtgaatttttgtatggggctcaattaggtctatgggttgaatcagacactgttaaaagattgatagtagaaagactgataaattataagctagtgcagtaaaacaagttattcttttaggtcttgtccaatataattattaggtgctgctcattcatgagattgaaagacctgaactgactccttgttcaatcctattttaagggagactaaggaaatgtttggtgtagcttttttaacttaaaagactattttaactttgaagttaaaaatgagttttaaatttagtataaattatgctgataccccttgatgctgaacaacatttcatttgataaccttcttttcttttaccatagacaaactttcctcaattaatataacagttcacatcaacataagtaatgtaatttcttatgcaattatataaattaaggaagatctaagtaatgtaataaaagtatatcaagtgtaatttagttaaatttcagaagttgtaatttgctctaaaatttaaagatatttggtagttttatattttttaagtttagaagttattttaagttaatgtctttgctagcgtgttcttagattttgaattttgaaattagaaataaagaagaaaaaaggaaatagaagttaaaagctattactagagtagtgcggggatcaattaatatgaagttgttttgacttaaccagagatcttaagtttgagtcctatgtatgcatctgtattaagttggattgttaaactaaaagtttaatatcaccaaacatctaaatcaactgacataaaattgttaaaattattttatattctcagtgtataatttatttgctcgttaaaataaactccaaataaattgaactaaatgttagtacctcaatcgttggacttctgtttctctttctaaacatctgaataaacagttttgatgactaatttcaggtgccctactggtttcaagtgtggtatcaactaccaggctccaacagtggtaccagaaggtgatcttgccaaggtgcaaagagcagtttgtatgataagcaacaacacagctgtggcagaggttttctctcgcattgaccacaaatttgacctcatgtttgccaaaagggcctttgtgcactggtatgtgagtgaaggaatggaagaaggtgaattctcagaagccagagaggatctggcagcccttgaaaaggactatgaagaggttggggatgaaggtgtagatgaagatgatgtttaaagttgctgagaagtaattaatcatttaatcctccttcactagctagtagctacctacatcttcctaagtttttattatgacttttgccatgtaatgttgtccttgttcattatttttatgcatgcatctttttgttgtatggtgtaacattgatcttatgattgttttaaattaaagtgttgagagaattgtttaattcatgtacaatggcagtgtaattgtcatgtcattttgatgaatcacatattattcatcctccaaggaatcatataccgaaacatctagtgagttattcattctatatatgagccgaatcagagaaaacatattctta

SEQ ID NO: 165 - DNA, 2479 bp, Glycine max
  source 1..2479: mol_type = genomic DNA
agccaaacagagaaacggatcattggaccagagaagcgtcttaataaacgctaacctctgtaccattcttcttcttaaaaatgagagagtgcatttccatccacattggccaggccggcattcaggtcggaaatgcttgctgggagctttattgcctcgagcatgccattcaggttcccaatttcaatacattcattcattattatctccatcccccttactagttactacatacttgcatgaatcttgaaccatttcacattcaacatatcactattgctcatcatttggccacaaaatccatatctgtttcggatattactaatcaaccaacgcataatatgacgttagttttttttttctttaactaatttataatttatgattcgaattctttgctgtttatgatcaatttagcgttcatctacgttgatctaacgttctgccattcgcaatatacagccataccttggtaaccatcttcagtttaaaaaaaataaaaatctatgagcatgctttgtagctaatttaaaaagagtccttggatgttgagcattactgtgttattttttaggctgatgggcagatgccgagtgataagaccataggtggtggtgacgatgctttcaacaccttcttcagcgagaccggtgccggaaagcacgtgcctcgtgcagttttcgtggatctcgagcccactgtcattgatgaaatcagaactggcacataccgccaattgttccatcctgagcagctcatcagtggaaaggaagatgcagcaaacaacttcgctcgtggccattatactagtactgttttttccccatttcaaaaattgtgccttttctttgattgtgtaataagtaattaacagtttttttttttcttatggtgatctctcaattcagttgggaaggagatagttgatctttgcttggatcgtatcagaaagcttgcggacaactgcactggtctccagggttttctggtttttaatgccgttggtggtggcactggttcgggtcttggatcccttctcttggaacggctttccgtagattatggcaagaaatccaagctgggtttcactgtctatccttcaccacaagtttcaacctctgttgttgagccttacaacagtgtcctttccacccattcccttttggagcacactgatgttgccgtgctacttgataacgaagccatatatgatatttgcaggcgttcccttgacattgagagacccacttacactaaccttaaccgcttagtttctcaggtttgcgtttcttcaacacttataagttgaaacaaactctgcaatatcattttacgagtctaccatcaatttagtccttcaagtattaccctctttctcaaataatttttaaattaatgaaattatgtaagttgttcctaaagtattgattattgaatatctatcaattttgtcctatgttatattttactaatgtctaaggaccaatttgaaggatttttcaagacttgggagactatttaagacaaaagagtaaaactttagggatgaaaaaaaattgatggtttattatccggttttatgacatgtgatcgatatggcttctttatgatcatattttcaggtgatatcatcactgactgcatctctgagatttgatggtgccctgaatgtggatgttactgagttccagactaacctggtaccatatccgaggattcacttcatgctttcatcctatgctcccgtgatttcagcagagaaggcataccatgaacagctttcagttgcagagatcacaaacagcgcgtttgagccatcctctatgatggccaagtgcgaccctcgccacggcaagtacatggcttgttgtctgatgtacagaggcgatgtggttcctaaagatgttaatgcagccgtagccattatcaagacaaaacgcaccatccaatttgttgattggtgtcccactgggttcaagtgtggcataaattatcagcctccaacagttgttccagggggagatcttgccaaggtgcaaagagcagtgtgcatgatctccaactccactagtgttgctgaggttttctcacgcattgaccacaaatttgaccttatgtatgccaagagagcgtttgtgcactggtatgttggtgagggcatggaagagggtgagttctctgaggctcgtgaagatcttgctgcccttgagaaggattatgaggaggtcggagcagaggctaatgaaggtgatgaaggagaggatggagatgagtattgattagggagttactttttcgtgatggggttcttttatgtactttccttggctttattttgtaagttgttgccatatatgcttgctgttatctgcatgaatggtttgtccatttgatggagcttgttctgtcccagcactaaataatttcaatgacatgattgtggcgctttagttaaaattgaaaggtttatgcgcagtaa

SEQ ID NO: 166 - DNA, 3122 bp, Glycine max
  source 1..3122: mol_type = genomic DNA
gtaaccatttgactttttagccatccttcatgtgctaatgtttatgtcaggttataactccaaggaaataaaacaaataccaaagaatcttctttgctttctctcctttgcactttcctcctcttccttgtgatttttgtttgcatcacagggagaaactgagacacagaagatgagagagataattagtattcatattggacaagctggaattcaggtggggaattcatgctgggagttgtattgccttgagcatggaattaaccctgatggcaccatgcctaggtacactgccttatatgatcattgctgttttatgtgttgtttacatgaattctgtatttggtaggttgtatcttcatgtaatttggcttgattctttaggtcttttgagtttggtgtattttctttactcaatttttggcattggatataagaaagattaatttgattgattttcaacttgattgtgttacttgctcagttagatgtaaccttaaacttggtatattttccaaattgcttctagggtccactgtttagcactctgccaaattggaaaactaggaatatcacttcaatttggatcaacatattactactctgctctgtagttatatgtttaaatgtaattctagaatcttataatttaacttgttcatgttgtttctatcattgtttcccattaattggttgagttattgtggagtcttggtggggtgttaagagtataaaaccatttggagtccaaattcatatcgaatgaattttatcactttctagtttctaagcttctattttctcattactctaaaaccagaacttaatttttgtttagacgaatccatttttattatttttcatcttttcttttataccaataactttcatttctatctgcttgcagtgatacctcagttggtgtagcacatgatgctttcaacaccttcttcagcgagacgggatccggcaagcatgtgccaagggctttatttgttgatctggaacctagtgttattgatgaagtaagaactggtccttacagacaactctttcaccctgagcaattaatttctggcaaggaagatgctgctaataacttcgcaaggggacactacactggtaattcaatttctgacgtagatcaaaattggcgattctcttccttgttttagctggaaaatgccatttactgtgtatttatgatgcagttggaagagaaattgttgaactatgccttgatcgtatcagaaaattagcagacaattgcactggtttgcaaggattcttggttttcaatgctgttggtggtggtactggttctggtttgggatcattactgttggagcggttatctgtcgattatgggaagaagtctaaacttggctttaccatctatccttctccacaggtattttattaaaatcattggaaaataacaaagaaagtaaaatgatctgtttgtggtgcatcaaacacttgttaacatcattctgtcttcggattttctagtctttgattcaggacagtattcctgtaggaaatatatttcttgcctgactaatcaaattcaaatggaaacaaatccagtgaaatattgtaggatgtcccctattttatttttgaatattctaagatgcaatgtaacattgtcacaaagtaaactacccactaggcttaaattactatagatacagataactttttctcatttgttgctctacattctctagggatttcttggttttgttaacttgtgttttattgtttacttattaattgtttgtatgtgtattttgttattgattatccatgtggaatgcctttatgatagtactgtttatcatgcaggtatctactgcagttgttgaaccttacaacagtgtcctttccactcattctcttcttgagcacactgatgtggttgtgcttttggacaacgaagctatatatgatatctgcagaagatcattagatatagaaaggccaacttacactaacttgaaccgtctgatatctcaaattatctcttccttgaccacttccctgagatttgatggcgcgattaatgtggacattaccgagttccagactaatctcgtgccatatcctcgtattcacttcatgctttcatcttatgcccctgtaatatctgctgcaaaggcctaccatgagcagctatcagttcccgagatcaccagcgctgtttttgagccatcaagtatgatggctaagtgtgatccaagacatggcaagtacatggcatgctgcctgatgtatcgcggagacgttgttcccaaagatgtaaatgcagctgtttcaaatatcaaggcaaagagaacagttcagtttgttgactggtaagtaaacttccttgtaatatcatattatgagtgatagtttagaatgtgttccttgcctaacggtttttttccttctattgtaattctaataacataatactttgtccaataatagctagtttggggacatgttctttgaagttttccattttttcttgacaaaaatcttatagggtgattttgatggcaaatttcaggtgccctactggtttcaagtgtggtatcaactaccagcctccaacagtggtaccagcaggtgatctggccaaggtgcagcgagcggtttgtatgataagcaacaacacagctgttgctgaggttttctcacgcattgattacaagtttgacctcatgtatgctaagagggcatttgtccactggtatgtgggtgaaggaatggaagaaggtgaattctctgaagcccgggaggatcttgctgcccttgaaaaggactacgaagaggttggagcagaaggcgaagaagaagaagaagaacccgatgattactcaaagtagtcaatcattcatcaccagctaccttacctacatctaccttctttcctctgtctaatgtctatccttgtccattgaattttaagcatctttctgttgtgtgctagctctgttagtgttgggtgagataattgctttcctcatgagaagcagtggtttatttgtcagtttgaatcacttttaagtttcagtgaaagagcaaaataaaggatagcgtaggagtgctgcagtttccattacttaaaa

SEQ ID NO: 167 - DNA, 2937 bp, Glycine max
  source 1..2937: mol_type = genomic DNA
actctcactataaaaactccctcactcactcttcttccaaaaactatctctctctctgtttatctccgcactccgtcttcatcaatcagcatcaccaccgctccaacacaggtacttactctttcgcttcttctcaaattctctctctctagatctagaattagaggttaattagtaagttaattatggtagtaattagcaaggttttgaatatctgtcacggttgcgttgctattgttgatatcgaggacagttaaaaaatcttgatgttgcggctgaaatcacggtcccttggtaattagtaagtaattaagtaacgagtgagtggtttttgaaatgcaggggaaaatgagggagatccttcacgttcagggagggcaatgcgggaaccagatcggttcgaagttctgggaagtggtgtgcgacgagcacggcatagatccgacggggaagtacgtcggaaactcagatctacaactcgagcgcgtgaacgtgtactacaacgaagcttcctgcgggcggtttgtcccacgcgcagtgctgatggacctggagcccggaaccatggacagcgtgcggactgggccgtacgggcagatattccggcccgacaacttcgtgttcgggcagtccggcgcgggcaacaactgggccaaggggcactacacggagggcgccgagctcatcgactccgtccttgacgtcgtgcgcaaggaggccgagaactgcgactgcctccaggggttccaggtctgccactcgctcggcggaggaaccggctccgggatggggacgcttttgatttccaagatcagagaggagtaccctgacagaatgatgctcaccttctccgtttttccttcccccaaggtctctgatactgtggttgagccttataacgctactctttctgttcatcagttggtggagaatgctgatgagtgtatggtgcttgataatgaggcgctctacgatatctgcttcaggactctcaagttgaccactcctagctgtaagttcatcagaaaccctaatttctgatccgaatgttagagtgtgtgtgtgtttagttataataatttatttttgaagtaactagtgtttagtttcgtcatgcgaaaccgtagtttctgatctgattgttattgagtctcgatgtggtcgaggacctgcggtttctaaaattggtttagaataaaaatgattttagttcaaattaattttaaagtaactagtgtttagtttcatcatgtgaaagtgttgagtttgtgcgtggttgaggtttctaaaattgatatattttgaataaaaatgattttagttcaaattaatcttgaagtaggtgtgttaagtttacatcatgaattgattttgactgtagtcaaaacttgattttatatgcttggttattgcttgctaaattgtttatctcaattttggtataaatataatcactttacttcaaatcaatttaaccataattaatttttggaaatcaattttgtaatcattcatccatacacaatacatgcaatttatgtttttagatgtttttattctataaacgagttattagtgtaaattattttattcattgcaaacattacttatcttataattattttaattcaaaatcaattctaaatcaaatccttaatgtaaaattagtcatgttaacatgtacttaaaattgtgttatagtaggtagtgcttcaaagtgattctgatgccaaacatggcgagatgatgtgtgaattgtgattgtttgtgttgcagttggtgacttgaaccacttgatctctgcgaccatgagtggtgttacatgctgtcttcgattccctggtcaactcaactctgatctgaggaaattggccgtgaatctcattcccttccctcgtctgcacttcttcatggttggatttgcgcctctcacctctcgcggctctcagcaataccgcgcattgacagtgccagagctgacacagcaaatgtgggatgccaagaacatgatgtgtgctgcagatccaaggcacgggcgttacctcacggcatcagccatgttccgtggcaagatgagcaccaaggaggtggacgagcagatgataaacgtgcagaacaagaactcttcatattttgtcgagtggattcccaacaatgtcaagtcgagcgtgtgtgacattgctcctagagggctctccatggcgtccacattcattggaaactcgacctcgattcaggagatgttcaggagggtgagtgagcagttcacggccatgtttaggaggaaggctttcttgcattggtacaccggggaaggcatggacgagatggagttcacagaggcagagagcaacatgaacgaccttgtttcagagtaccagcagtaccaggatgccactgccgaggatgatggggagtatgaggacgaggaggacgatgatgttgaagcagaccacatgtgaagagactgaatgtgaaagatgcctgtgtcttacttatgctatgtgatgcgtaagtgtgtttgctctgctctccaacgtgaagaagattgtaattactaatagtgtatgtacggtttgcgggataaaactttgatgagcttggtgtggagaatggaaaaaatagggggttagtgggagtggagtttgggaacaatgttatgcggcacctatctgtttgttcttatattggcttgcttttatgttgttatattgagtcatgtttccgtaatatttgttgttcttatgcatgacttttgtctacgttggattcttggaatgtctttggagaaagccttgcctcatgtttttgtctatactgtgttgaggtcaaggtgtgatttaggatactgatcgaatctagttatcctttgagaaagtggaagattaaccccttgctctacatatatgcataacagagcaacaaagattccaatca

SEQ ID NO: 168 - DNA, 3196 bp, Glycine max
  source 1..3196: mol_type = genomic DNA
atatataatatagtatatagtatagagtgtatacatacgataaaagataacattggattcacatacgtatccaaggatagagctagcgaaatacatggaagagaggttgagagggacagttatgcgctggtacagttggcgcctgaacaccacctacactcgcccttccattattaccctctctcagatcccataattaccatatatatagagagaaagagagagagagagagaggcaaatataaatgtattgaatctgcgcttcatatcagaacccgaaaataaccacaagaatgagggagatattgcacgtgcaaggtgggcaatgcgggaaccaaatcggttccaagttctgggaagtgatatgcgacgaacacggcatcgaccccaccggaaagtacaccggcgacgaggcctccgatctccaactggagaggatcaacgtctactacaatgaggcctccggcggaaggtacgttccccgggccgtcctcatggatctggagcccggcaccatggacagcatcagatccggcccatacggcaagatcttcaggcccgacaacttcgtctttggccagtccggcgccggcaacaattgggccaagggccactacaccgaaggtgccgagttgatcgattccgtcctcgacgtcgttcgcaaagaggccgagaattgtgactgcttacaaggtacgtactatcgtgtacaaattaatataatattatattttcattcactcatcatcatgtatatggagtttctttttgtgcttatgtgctgattaatcattattactatagatctattagaataattaaaagaacgctactagatctggcttctggaactcacttggttagtactactatcactgcatcaggttcattttcttttctttttatggtgtcggctttctgctgcaataattgatgcttcattatttttgttgtttgagcccatatgttatttcgctgaagttgacacttgacccgtgtagtgggagaacaggaagggaccacgtggccatactttatcatgcctcgttgaatattaaataaatatcttatttgtttcccctaattatatgtgcatgactttgatagtgtaacaattagtaagcaccgacaatgtggttttacttttgtaaattggaaattaagttgagggtaacaaaagtgaatcaaaatctttatctcaatgtcgatcttagaaagaccaattgttcactacagtctatagtacatgaatttacaagtgccacctcaaacaatgtttctttatttcgataatctatgacattattctttctttctttttttcttttaacacctaaccaaccttataactacacctcaaacaatgtattttcgcacatcagaagattttgtatgagtacaacctgaaacaataacgcagcttcactatgggtaaattatatggttttgagtttcatgtatgttcattttgagtcctttttctcgatcaggttttcaagtgtgtcactcacttggaggaggcacgggttctggcatgggaacactgttgatatcgaagatcagggaggagtacccggacagaatgatgcttactttctctgtttttccatctccaaaggtctctgacacggttgtggagccttacaatgctactttgtccgttcaccaactagtggagaatgcagatgagtgcatggttcttgacaatgaagcactctatgacatttgcttcaggaccttaaaactcaccactcctagttgtaagtaccactccctcttggatttggatttctccatgcattcacatgttcaacaattggaaaatgtggataaagttttttcacacaatcaattaccgtaaaactgtcagataaagattcgactgactcccactcagatccggattccctgcattcatttttgcacacattcaaacatttagcaatttgaaacagttacataaatatgagactacataagtatctaagactcaattatgtatcatgtgaagattgtccaagaccatgtatcataatttaagatcatgtaaaatttcccatagccagaattcccttccaccacccccaagtaattaattagccatgtaaccaacaataacttggttaatttaggctagaaactactaaaagaaacttaattatcaaataataaaacaaatttttcaactagtaaaaaagataaaaactaattgaaataccttatcaaatacactcttaatgttaatcttttggttgcagttggtgatctgaaccacctgatatctgcaacaatgagtggagtgacctgttgcttgaggttccctggacaactgaactccgacctgaggaagctagcagtgaacctgatcccattcccacgtctccacttcttcatggtggggtttgcacctctcacctcacgcgggtctcagcagtacgtgtccctcactgtccccgaactcacccagcaaatgtgggacgccaagaacatgatgtgtgccgccgatccccgccatggccgttacctgacagcatcagccatgttcaggggaaagatgagcaccaaggaagtggacgagcaaatgatcaacgtgcagaacaagaactcgtcctacttcgttgagtggattcccaacaacgttaagtcgagtgtgtgtgacatccctccgaggaacttgaagatgtcgtgcactttcattggaaactccacctcaattcaggagatgttcagaagggtgagtgagcaattcactgcaatgtacaggcgcaaggccttcttgcactggtacactggtgaaggaatggacgaaatggagttcactgaggcagagagcaacatgaacgatttggtggcagagtaccagcaatatcaggatgctactgctgatgaggatgagtacgatgaggaggaggttgaggagggggaacaagcttactaggaccagtaaatggttcatcactaccttgttttaattactaaatttcctgctagtagtcatgtatctatatatgtctgtctctacttttttccattctacctatttctcctatatttttggtgatgttcgtatcccttttttaagttttaagcgtattaattaattacctttgaattgtttgatatgttcctcgtagaccagattgttcattgttctataatctaagtgtatgaataagaaaggttggcttatctagaa

SEQ ID NO: 169 - DNA, 2368 bp, Glycine max
  source 1..2368: mol_type = genomic DNA
gctccttcttttcacagacaagggtttcttccgggttcacgtttcacaatcactttttgcgcttctctcactcactcactcttcttcttcctcttcgtgtggttttctttctcgaactcgaacgaagatgcgtgagattcttcacatccagggagggcaatgcgggaaccagatcggagccaagttctgggaggtggtgtgcgcggagcacgggatcgattcaacggggaggtaccaaggggacaacgagttgcaactcgagcgagtcaacgtctactacaatgaagcgagttgcggaaggttcgtgcctagggcggtgctcatggatctggagccagggaccatggacagcgtcagatctggtccctacggtcagattttccggccagataacttcgtctttggacagtccggcgccggaaacaactgggccaaaggtcactacaccgaaggcgctgagttgattgactccgttctcgacgttgtcaggaaggaggcagaaaactgtgactgccttcaaggtataacttactctaactccctgcgctatttttagggttcttgcgtttcagcgcttgttgtttcgatttgagtttgtttgttagtgttataagagttgtttgtatggttgagtgggaatcgatggtctctgtggtgtttaacttgtactgttgcaacgaagcagttaagctagagtgtttgtaggataagtcttgatctggaaaatcactcggtggattttgctggttttgaagtgtagtaatgtttacagttaattaattgcccaagttttgtgagacgttgttagcgttgttttccgctgttttgtatttgctgaaaagaaaattagcggaaatggttaggtgtgtatgctattatctatggtgttcgttagtttttaatttgtgatttgtgtgaagacatgcttgaaccatgagttaagaatggttgaattgaaccaattcctcgagtttgtgtgtaatactgaaatttttgtgctccgatgtttttttattggtaattgctaagtaattagggttctaaaaaaagtttgcgtgagtttcagggtttcaggtttgccactctctcggtggtggaactggttctggaatgggaacactgttgatctcaaagatcagggaagaataccctgaccgaatgatgctcacattctctgtgttcccatcccctaaggtttctgacactgttgttgagccttacaatgcaaccctatcagtgcaccagctcgttgagaatgcagatgaatgcatggttttggataacgaagctctctatgacatctgcttccgcacgcttaagctcaccactccaagctgtgagttcatctcaccaattcttctattatatctttgcttgtgctgctctttcacctctttgatttgcttactgacattgtgattttgttgttgtttcttaaacagttggggatctgaaccatctaatttcagccaccatgagtggtgtgacatgttgtcttcgtttccctgggcaactcaactcagatcttcgcaaacttgctgtgaatctcattcccttccctcgtctgcactttttcatggtgggttttgccccactcacatctcgtggttcccaacagtacagagctcttactgtacccgaattgacccaacaaatgtgggatgctaagaacatgatgtgtgcagctgatcctcgccatggtcgatacttgacagcttctgcgatgttccgtggtaagatgagcacaaaggaggttgacgaacagatgatcaatgttcagaacaagaactcatcatactttgtggaatggatccccaacaatgtgaaatccactgtctgtgatatccctccaactggtttgaaaatggcatcaaccttcattggcaactctacctctattcaagaaatgttcaggagggtgagtgagcaattcacagctatgttccgcagaaaggccttcttgcattggtacactggagaaggtatggatgaaatggagtttactgaagctgagagcaacatgaatgaccttgtgtccgagtaccagcaataccaagatgcaactgctgatgatgagggctatgagtatgaagatgaggaagaacctcaggaagatgaggtttaaaacaatagtagtgatttgcagggtgttcttgtttgtgttttgttgtgatactctgttaatgttgtgtttttttcatcccttgacctgaatatctttttcgggattttggattgttttggggcactctgtgtctgtcttcgtggctggatttcgtagtgtttagggattttatttttctgcttgttttcattattgttaacatggtgccctctgattgaaacgtagttgatatattcttattaa

SEQ ID NO: 170 - DNA, 3010 bp, Glycine max
  source 1..3010: mol_type = genomic DNA
agtgtcgtttcgtctggttcctagttccttatgacaattggacaccaccaaaaaaagatcattttaaaaacattccctctcttccaaaaacaccctcgaaacattccatatttacaaaacaggaccatccttcaaattctcccccaccaccattggccccgcttcattcattttcattccaaactcacaaattctcaaatccaaatccaattccaattccaattcccaatcttctcaaaccctaattcctcatcttgaaaatgagagaaatcttgcacatccagggagggcaatgcgggaaccagatcggagcgaagttctgggaggtgatatgcgacgagcacggcatcgaccacaccggaaagtacagtggcgactctgaactccaattggaacgcatcaatgtttattacaacgaagcgagtggcggaaggtacgttccacgcgccgtcctcatggatctagagcccggcaccatggactccgtcagatccggcccctacggccagatcttccgccccgacaacttcgtcttcggccagtccggcgccggaaacaactgggccaaaggtcactacaccgaaggcgctgagctcattgactccgttctcgacgtcgttcgcaaagaagccgagaattgcgactgcttgcaaggtataaattgaattagaataactatcttgaacgatagcgtttttatccgtcattagaataattatcttgaactagagtgtttttggctgtcattcttcaactgaatattttcatggattttttttttttatcaacgtttgttagttttttcgatctccgtgcaatgcataagttgaatctactggttgcttactaattttgattgattgattgattgttgtgattttgatggaatttgaataatggtggtgatgatgatgtggcagggtttcaagtgtgccattctcttggtggaggaacgggttctggcatggggacgcttctgatctccaagattcgggaggagtatccggatcggatgatgttgactttttccgtgtttccttcgcctaaggtttcggataccgttgtggagccttacaacgctaccctctctgttcaccagcttgttgagaatgctgatgagtgtatggttttggacaatgaggctctctatgacatctgtttcaggactttgaagctcgccacgccgacatgtgagtttcgggtttctctttttgattggtgttttttgttattgttgttgttctgtttcttgcagattatggtttaattgtcaagtaaatggtggtctaattatctggttttgctttcaatttcacaatttaaactatgtttaaggttctgttagcttagatgagtaatgtttgtcactgtagtgattgtttatttagataaatttctctctaagaacttagagaagaaaataagaaggaaaaatgaaatatgcttttcccaaagctaaaattagcttatgcattagttaagtcaacttttaaaaactaaatgagacagctacaataacttaacttacacataagctaattttagctcatgggagaagtgtatttcattttgtcttgtatggttgtttatggagaagtttattcaaatagagctgaagtgtcattgtgttagtggggccagggggggattttgtgtcttggtagttgtggtgggtgttgttgttcagcttcttctatcaatttggttttcagtcactttctctaaatggaatgtgtggtcacttcatctgatgatatttttttgagatttttatgtaagatgttaaaaaaattattgttaagaaaattgagttttgtttgggaatgatattttaaaagtggttacaagaattttacttgaatgataaaatagaaacattttgaagtttaggtttttgtggttccttcacctaaaacaaattttactcccatcagaaaagctaaaaaaatatttagtttttaatcaattctactcattgcaggatttgattttgagaactccaaaaattacccggacaactgttgttagtttatgaataaattctttgggggccttaagcaaacatgacatcagttgtaagttcaattttttgaattaatttttttaatcttgttttgattacagttggtgaccttaaccacctgatatctgccaccatgagtggagttacttgttgtctacgtttccctgggcaattgaactctgatcttcgcaagcttgctgtcaatcttatcccattccctcggctccatttcttcatggttgggtttgcgcccttgacatcaagaggatcccagcaataccgtgctttgactgttcctgaattgactcagcaaatgtgggatgccaagaacatgatgtgtgctgctgaccctcgtcacggtcgttatttgactgcttcagctatgttccgtggtaagatgagcacaaaagaggtggatgaacagatgatcaatgtgcaaaacaagaactcttcatactttgtcgaatggatacctaataatgtgaagtccagcgtgtgtgatatcccacctaagggtcttaaaatggcatccactttcattggtaactcgacttcaatccaggagatgttcaggagagttagtgagcagttcacggctatgttcaggcgcaaggctttcttgcactggtacaccggggaaggaatggatgaaatggaattcaccgaggccgagagtaacatgaacgatcttgttgctgagtatcagcagtaccaggatgctactgctgacgaggacgagtatgaggaggaggaagaggaagaagagattgctgcttaaggcgcctctcttatttgtcaaaaattgtttcaaatatcaatatggttggctttgaacgagtggtgtaagtttaaattgtggtgcagtcaaattagattgactcgttaatgtgtatgcttatcgttgattgttgacattgtataaactgggttttgttgacaatgcttatgttcttgagagatcaagtcatggatgtttgtaatagttaa

SEQ ID NO: 171 - DNA, 3215 bp, Glycine max
  source 1..3215: mol_type = genomic DNA
aaactcgtccgtttgagttttgactgccaccctcatcacacaagagagagagagagagaaacactcacccgcatagggtccacaaaaaaacagtaccctccagctgtacattcaaataatttcaaatttcaaaagaaccctctctcatcaaaataaaaaaaaattaaaaaaaaaattcacagctcacacccgtttaccccacccccataatcaaaatccaaccgttgcaacaagaagccaccaactttctctatataaaatcacccctcacccacatcttacaccactcaatcccaaaaccctcttttttctctctcttgcaaaacctaattttcatttcttccctcaaatttcaaaatgcgtgagatccttcacatccagggtggccaatgcggcaaccagatcggcgccaagttctgggaggtggtttgcgcggagcacgggatcgaccctaccggaaggtacggtggggactcggagttgcagctcgagaggatcaatgtctactacaacgaggccagttgcggtcggttcgtgccgcgcgcggttctcatggacctcgaaccgggcaccatggacagcgtccggtccgggccgtacgggcagatcttcaggcccgacaactttgtgtttgggcagtccggggcagggaacaactgggccaaggggcattacactgagggtgcggaattgattgattccgttctcgatgttgtgcgcaaggaggctgagaactgcgattgcttgcaaggtatgtgagggggtttcatgggtaaaggttgcatcattttagggttttgtgggtgggttttgaattggttgtgtgaatttgttgagtgaatgaaagatggttcgtgtgatggaagggttttgtcgttggttcgcaaatgatggtttgtgagtggtaccttttgtctaaaggtggaaactttttagggttttttgggtggttttgaattgggtgtgtcatggactttgtttaagggttttattggtgtttttgggttttgcatgtgtttttcttgaagacggtagccttagatgtgttttgtggctgatttggaatcatgttgattttttaaatgaaagtggttatttgaaggattttgtggttgattttttagatgagaagtatattttgtggtcgatttttgaaatggtgtttatttccagggtttggggttaatttctgagatgagacgtttatgttgtgtttgaaattttaaatggaggtgttatgtggggttttttttttggtaaaggttgcagcattttagggttttgttggtgggttttgaattggttttgtgggtttcatggagaagtttatgagggtttgttgggtttgtttttagtgttgtgggtggttttttggtttttcgaaattagggtgtggggtggtggttttcaattctttgtgtgaatttgttgagtgaatgaaagatggtttgtgtgatggaagggttttgtgggtggttcgcaaatgagggtttgtgagtggctaccttttgtctaaaggtgatagctttttaggggttttggggtggttttggattgggtgtgtcattgactttgtttctaagggttttgttggtgtttttgggtttgcatgtgtttttcttgaagacggttgttatctttgttaacttgatgtgttttgtggttgatttggaaacatgttgatttttgaaatggaagtgttcatttggagggttttgtctttgatttttgagatgaaaagtatattttatggttgatttttgaaatgatgtttatttccagggtttggggttgatttctgagatgagaagtttatgttgtgtttgaattttgaaatggagttgtttatttggagggctttgtgggtggggatttgaatgtttgttctgtgattgtttttgagatgtttcttcttgttgcaggttttcaagtgtgccattccctggggggaggaactggatcaggaatgggaaccttgttgatttctaagatcagggaagagtacccagatagaatgatgcttactttctctgttttcccatctccaaaggtttcagacactgttgtggaaccctacaatgctactctctctgttcaccagcttgttgaaaatgcagacgagtgcatggtgcttgacaatgaagctttgtatgacatctgcttccgtaccctcaagctaaccacccctagctgtaagattttacaaatcccatataaccgtttttacaatcaatattagggagtttgtccaattgttcaatgaggatatactgactgtgttgtttcgttcttgtgcagttggtgacttgaaccatttgatctcagcgacaatgtctggtgtcacttgttgtttgaggttccctggtcagttaaactctgatctgcgaaagcttgcagtgaacctcattcccttcccgcggctccactttttcatggtgggatttgctcctttgacatctcgtggctctcagcaatacagagccttgagtgttccagagctcacccagcaaatgtgggattccaagaacatgatgtgtgctgctgaccctcgacacggccgctacctcactgcctcagccatgtttagaggaaagatgagcaccaaggaggtcgatgaacaaatgatcaatgtgcagaacaagaactcctcatactttgtggaatggattccccacaatgtgaaatccacagtctgtgacattcccccaaccggcttgaagatggcttcaacattcattggcaactctacctccattcaggagatgttccgtagagtgagtgagcaattcactgctatgttcaggaggaaggccttcttgcattggtataccggggaaggcatggacgagatggagttcactgaggctgagagcaacatgaacgatcttgtgtcagagtatcaacagtaccaggatgccactgctgatgaggatgagtatgaggaggaagaggaggaggaggagtatggccaacatgatatgtgattttgaacttggtaatgtattgcggtggcttgaagatgtataacatgccgcaacttcctgttgccggttgattgtctcttttgaggggatggttctgttccggctagatctagtttccattactgttctataaaactggttctgtttgtttccgtttttatgtaacctgttgtttgtagggaagacaatatgaaactgctattattttaaagctctaaatgttcaatccaa

SEQ ID NO: 172 - DNA, 2418 bp, Glycine max
  source 1..2418: mol_type = genomic DNA
tcccatatcctacgaacgctcctcacttgcagaattcaaagaaggcgtcttcataaacgcctttattctccgtttccgtttccttcccggaattcgatttttcatctctgaaaatgagagagtgcatctcgatccacattggtcaggccggtatccaggtcggaaatgcttgctgggagctctactgtcttgagcacggcatcggggtaagtcttcaatctcaagatattttgattcagatctgtgttgtcaaaggcttgttacctgcactttctttcttcatatttctattatttctcagatctaaagaactttgaacgttattttcaaaatttcagacgtttatgatttttctcttagattaatgcgtctttgaactcccacatgttggcattgtgctttaattcacgtgttttttccgtctgtcctgccagatctgttttgtttttgcactttctaaatcgtttatgcatgttgttgttcggatctatatgagtagctaggtaataaatttcattagatcgttctgatttaatcgttttattttgaggttaaattttatgtttgtgcttctagagttgtagatgttattttttctatatttttgaacaattaaaagtagtttctctaaaatcagtttacgatcaattacgtatgaactcatttctccttttattttcgctctattttataggcaacgtgaatttttaatgcgatttaaaaatatttatctatggaaagtggatgcttataatttgtttctatttctatgcagcccgatgggcaaatgccaagtgacaaaacagttggcggaggtgatgatgctttcaacactttcttcagtgagactggtgctggaaagcacgtgccacgtgccgtctttgtagatcttgagcccactgttattgatgaagtgaggaccggaacttaccgccagcttttccacccagagcagctcatcagcggcaaagaagatgccgccaacaactttgcccgtggtcattataccagtaagtcacaccatttatcatactttatttcctaatgttgttagtaatataatttcatatacctaatgatatgttgtacttgtttggtgccttatcagttgggaaagagatcgttgatctgtgcttggaccgcatcagaaagcttgctgacaactgcactggactccaagggttcttagtattcaatgccgttggtggaggaactggttctggacttggttcccttctgttggagcgtctctccgttgattatggcaagaaatccaagcttggtttcactgtctacccctcccctcaggtctccacctccgttgttgagccatacaacagtgtcctctccacccactctctcttggagcacaccgatgttgctgtccttttggataatgaagccatctatgacatctgtaggcgctcccttgacattgaacgtcctacctacaccaacctcaaccgtcttgtttctcaggtaatgatatgcatatgttgatatatgtgattccttgtaatcattagtgattaatatcaactaacttgttatacttttctgtgtattaattaattggtgtttctttgttttggggttcaggtgatttcttctttgactgcttccctgaggtttgatggggccctgaatgtggatgtgactgaattccagaccaacttggtcccatatcccagaatccatttcatgctttcctcctatgctccagttatctctgctgagaaggcctaccatgaacagctttcagtggctgaaattaccaacagtgctttcgagccatcgtccatgatggccaagtgtgaccctcgccacggaaagtacatggcatgttgcctgatgtaccgtggtgacgttgtgcccaaagatgtgaatgctgctgttgccaccatcaagaccaagaggacaattcagtttgtggattggtgccctactggtttcaagtgtggtattaactaccagccccctactgttgttcctggaggtgatcttgccaaggtgcagagggcagtttgcatgatttcaaactccaccagtgtggctgaggtgtttggtcgcattgaccacaagtttgatctcatgtatgccaagcgtgccttcgtccattggtacgtgggtgagggtatggaagaaggtgaattttcagaagcccgtgaggatcttgcagccctcgagaaggattatgaagaagtgggtgctgagtctggtgagggccaggatgaggacgaagactactagaatctacttcagattcttgttcttgtggtctttttctgttgttgtgtttgatgttcagatgtaccagtaccgttgtgggttttaatttggatgcattgtttttatgcttcgctgcttctgttacagacccaaacggaatggcaatatatattttgaccattgtctgaa

SEQ ID NO: 173 - DNA, 5674 bp, Glycine max
  source 1..5674: mol_type = genomic DNA
gggctagcagtgagtgagtgttgttaagaaggcaaaggcatcgttttcattttagttatagtttttgaaaaaaggttcttccccgccaccaaaccctagcttagcaaaatgccgagggaaatcatcactcttcaggttgggcaatgtgggaatcagatcggcatggagttctggaagcagctctgcctcgaacacggcatcagcaaagatggcatcctcgaagacttcgccactcaggtctcgcccctttcttaattctactcaatttccccgtctttgttacggaatggtttcaaatgattatttgctcaaaatgctgcaggggggtgaccggaaagacgtgttcttctatcaagccgatgaccagcattatataccacgggctctcctgattgacttggagccaagagtcattaatggaattcaaaacagtgactaccgaaacctctacaatcatgagaacatctttgtctcggatcatggaggtggtgcaggaaacaattgggccagtggatacgatcaggtttcttactacttactagagcatttttttgtaattaatatttgtatgccattggttgactttgtgtctttgttacttccatgaaccctctcaatgcatagcaatcaactattgtaaacttatgtccctttttgttttaaagttacaacatcaattcttgcactttccaatgtaaatatatgatactgattaatttaggcttggatttcaatcacatttaatttaatggttcaaattcagtctagccaacttcgaacctaacagacactaactcatgctcatgccatgccatcacatggagaagtttttctacttttgtgcagtgccattgatgctccatttgtttggtgtttatacatacataaagagaaattttgaatgtgtgtgggtgtgcttttggacactccagatgtttgagtcaatgtagacacaactgacatcacaaaactagtgatgagtttttccccccattttatgatactgatgatgatcctgcaatgttgggcaacatgcagttgtaatctatgtctaattgtccataaatggctatggtatttattgaagcactaaatggaactagataattgtttaaagatatcatgtaaagtcacaggccaaacctctatatgtgcataagtttatttgttttctagaactagacatgcctaagatggtttgacactttcacctgatattgacaaacttctaatacttgagcagttctttgctgaacctgatttaggctttccaaatgactttacaaatgataatcctgacaagttgctccataggaatggttatcaacatttttgaagcataaaggaagatcttgatgggcaatatgcaataagtgataaagtcatagtttaactagtgtggttgttaatatcttgtcagggacaacacgttgaagaagaaataatggacatgattgacagagaagcagatggcagtgacagtcttgagggttttgttctatgtcattcaattgcaggaggaacaggctcaggtgtcttcataacatctttgcattaaaacatcctataagtttcttcaatttcccctctttgtaattgagcatttgtttagtgggagtatctgaaaaagtaaaagattgctgaaatgattgactaaattttcacctgattcataatcttaatttcaactaaaacattatattgtacccttaagagagaaaattgaacagtattgcaccgtttagcgtatctcagactgaaattgcttataatacagtggttgggattcctatttgcctttgaaattgctatgtactagatgaaattttttggagatttctcaagtattgctaacctatgtagttttataattattattttttaatttctcttgtgtaataagtatatttccttacttctacgaaggtatgggctcatacttgttggagactctgaatgatcgctacagcaaaaaactagttcagacatacagtgtgtttcctaaccaaatggagacaagtgatgtggtggtccaaccatacaattcacttttgacactcaagagattgacacttaatgcagattgtgttgtagttcttgacaatactgcgctaaatagaattgctgtggaacggcttcatttatcaaacccatcatttgctcaaacaaattccttagtttctacagttatgtctgccagcacaacaactcttcgttatccagggtacatgaataatgacttggttggtcttcttgcctctttgattccaacaccaagatgccattttctaatgacaggatatacgcctttgactgtagaacgtcaggtgagatcactatgtcatttttttcctaaaagaatgattttggagcatcgaagcttttccataaatttgtgtcttcacttgtgaagatttctgttggtaaattgttgaactggaaggtatcagcagggaaattatgaattcatctctctttcttcccccccattttaaacttctgtaatctgattgctatatgcacacattgctcaaaaatgtgatttttcttttaacacttgaaaattttgatgttatttccttgcaggctaatttaattcgtaagactactgtacttgatgttatgagaagacttctgcaggtataatgactgcctaaacagataagcttcaaattgaatgcctttgtgctctactgacaggtatattcttggcaggcaaagaatattatggtctcttcttatgctcggaccaaagatgctagccaagcaaaatatatatcaattctgaatatcatccaaggagaggttgatccaactcaggtaattagaaatagttgtgcagtatttttgaaataggagacttgtctttgggacagcaagtgtattgctgtgtttgtgacataggagacttttttgtctctgggacagcaagtgtattgctttattttgtgatttcagtgttaaatattatcttttatttacttttatcaattggtgttctatcctgcagtcacataaaatctttagcacttctatactttgataaaaaaaaccttgaaaaattaaaagaagtatttcttttaacaaaaattaaattaaccttcctctgatactggtagcctttctagtttttttttactgtatttgtaatgttataaagttttcatcatgttgcagcttgcccaaattgacttgtgatagtgaaatatcatgcttttgtatgtaaatattttaacagctctactatactatgtcatgattttgtctttctatatggatttaggttcatgaaagtttgcagaggattcgtgaaagaaaactggttaactttattgagtggggtcctgcaagtattcaggtctgcgttctgtggtagctggtgaatttgtctcctttgtattagttttaggactcaatctgatctttcttctttcctacacttctggtaggttgctctatcgaggaagtctccatatgttcaaactgcacacagggtagaactctccatttttctttcagtctttctttttatgcatatcttacttttctgctttttttatctgatggttatattggagatagatcagcacacacacacacacatattgattaaaatggtttttgttctgtggttaaaatcaagaaattgggttatgaaataacctattgttgctgcatttggtaggtcagtggccttatgctggcaagccatacgagcatccgtcaccttttcagtaaaacattgagccagtatgagaagttgagaaagaaacaagcctttatagacgtctacaggaagttcccaatgtttgctgtaagtgtcacaatttcttatggataatctgatatccatctgcatctgttatatacttctttggcctgtagcatcttcatgtaatacttgtcatttcatgtgatgacatcaataaaaaatggacaggataatgacctctcagaatttgatgaatcaagggacataattgagagtttggttgatgaatacaaggcctgtgagtccccagattatatcaaatggggaatggaggtagattctctacaaatcccacgtaccattttaagcacatctttcgtattgctaattttttgccgtcttatttaggatccaaacaacatgctaacaggagaaggcaatgctacaggatcattggattcaaaatcagtagcgtgaaaaaaccaagtaagctacgattaggccataatttaggctttaagtttctggatttgattttactttctttctctagcaagataaataagatatcaacttgctataaatttgagttatcagttttgaacatgtgaatatcagttgttgtattctttttctccttgtgacatgtgacttcaccgttattagcatttatttttttatatttttttaaaaattctcaaattattaatttctttaaaatgttgtttttgcattatttttttttgtccttcaaatctccactttcttaaattaatttctttaattttttatattaaaatatactttttcatcttaaaaattaaagttatactttcaattttttttaaaagaaattattttccctctaaatctaaactaatattttttatttgtttatttaaattaattatgcatatttttcttataattttgaatatttttattttatttttaaaaattagatatgcaatgcacatgatatgtgctagttgatagggaaaaaatgaagattgaaattgaatgttaaacgtggttaccttaaatgtacaccatttatttaggttcaatcaggcaggagcaatattttggtttgctttccttcttgaattgtctttactctctcaagtgtgaacttagtgtttgattctgagtatacaagtatgttgtcttttaagtctgtttcccataaaaataaaattttattttccgtgttattttgtctaatatgctttctcccatcaaatactatcatgatgattatgtgttcatattaaattttatataatcttaatgtaatctaattatatctgtttggagtttggactggaaatagaaattatattacaataaacaatttttaaatatattgagtttaaacttgaatatttgatccactgacaatgaaactttatgctgtcagtgcacaagaaagtgtcacatcattgtagtaactaatatttatcacttgaaatctaatcttttaagaatttcgtaaataggtacaaccacatggtttagggataaacgtaaaccttttacactgttcgtaaatcggcaatttaatcctctgggaatcttgagtacttggtgggaaagtgacaaacctgaaccaaatcattgcaggtaccacaaggaaatgatttttgtgaatgatcaacaaggtttccaatgaaattttcaacttttttggggcgtgagatggtatgcggtgtgattattttggtttgcattttgtttgctaatcgtttgtacccaagggagattgagtacagaatctctctgtattgattcgtttttagcaatgtatatggttggttggtttggtcattgaaatgtagagaattaggaaacctagtttctttatctgggtctgatgtgtttgttaggtgatcttgctgttgctttggcatgaatattaaaatatttaaatttgaattgatgtgggcatagatttacacggtt

SEQ ID NO: 174 - DNA, 2171 bp, Glycine max
  source 1..2171: mol_type = genomic DNA
aactcccagactcacattcgaacgggaaaaggcgtcttcataaacgccgcccaaaaccatttatagggttttcttttctttgccaagaaaatgagagagtgcatttcaatccacattggtcaggccggtatccaggtcggaaacgcctgctgggaactctattgccttgaacacggcattcaggtaagctttcaaatgattttattttcggcttcggcttcggcttcggcttgggttgtaatgcttctttttttcttcttttttttgtgttcagcccgatgggcagatgccgagtgacaagaccgttggaggaggagacgacgccttcaacacattcttcagcgagaccggcgccggaaagcacgtgcctcgcgccgtcttcgtggatcttgagcccaccgtgatcgacgaagtccgaaccggcgcgtaccggcagctcttccacccggagcagctgatcagcggcaaggaagacgccgccaacaacttcgcgcgtggccactacaccatcggaaaggagatcgtcgatctctgcctcgacaggatccgaaaactcgccgacaactgcactggtctccagggcttccttgtcttcaacgccgtcggtggcggcaccggttccggcttgggctcgcttctcttggagcgtctctccgttgactacgggaaaaagtcaaagctcggtttcaccgtttatccttcgcctcaggtttcgacctcggtggtggaaccctataacagcgtcctttcaacgcactctctccttgaacacaccgatgttgccgtgcttcttgacaacgaagcaatctacgacatttgcaggagatcacttgacattgaacgccctacctacaccaaccttaaccgtctcgtttcccaggtatatagtcaaaacttttttgaaacgaattttcagtcgttgattctaaccgttaaataaacatcgaaatgattagattttaatgcttgattaaaattcaaatcattggtcttcatgtgaaggttttgagtttctgatttcatgaatgtgtttgaattgacttaataatttaaattcgaatgaacctggatttcatgtaatgaatttctccatgcattcccatagttataatttgggtgtcaaggagatctagctcaattgattgactaaggttcatgagttcttaaagctcttgatgctttcttctgtctttcatttctacgaataaaaaaaaaggttaataattcgggtggcttaatatttattaattttgataagtctaaatcttactaaaatctgattgttacgatgaactgaatcttaatctgtttgatttttttaaaaatttaaaaatttgcaggtgatttcatccctcaccgcctcgttgaggtttgatggagcactgaacgttgatgtgactgagttccaaaccaacttggttccttaccctaggatccatttcatgctttcctcatacgcccctgttatctctgctgagaaagcataccatgaacagctttccgttgctgagatcaccaacagtgcctttgagccatcctccatgatggccaagtgtgaccctcgccacggcaagtacatggcgtgttgtttgatgtatcgcggcgatgtcgtgccgaaggatgtgaatgctgcagtggccaccatcaagaccaagagaaccatccagtttgtggattggtgcccgactgggttcaagtgtggtataaactatcagcctccaaccgttgttcctggaggtgaccttgccagggtgcagagggctgtgtgcatgatttctaactccaccagtgtggctgaagtgttctcaaggattgatcataagtttgatctcatgtatgctaagagggcattcgtgcactggtatgtgggtgaaggtatggaagagggtgagttctcggaggctcgtgaggaccttgctgctcttgagaaggattatgaggaggttggtgccgagtctggtgatggagatgatgatggtgaaggagatgatgattattagagtgtgtcaaatatctcctatatcgtgtttgatgattagagtgtgtcaaatatctcctatatcgtgtttgatgatgtgcactttttcgttttcttttggacaaagttttatcatgtgtggtttttgaatgatgattgttaatcaatatatgtgctatgtaagtttctataa

SEQ ID NO: 175 - DNA, 2746 bp, Glycine max
  source 1..2746: mol_type = genomic DNA
aataattaaccgcaattaaaccctcacacaccatctcgcttccataaatccacgaaaaaaaagcgaagcacagcacagcactgcactcttcgcaacacaacaaaaaaagacaacccagagagcgcgtcttaataaacgctcttctctgaaaacccccatttcttttcttctttcttcttctctttcgcttcttcgatcttcgatcttcgtcgctgaaaatgagagagtgcatttcaatccacatcggccaggccgggattcaggttggaaacgcctgctgggagctttactgcctcgaacacggcattcaggtctattttctcaaccctaaatctccgtactgtaatttttttaacctacatttttccgattcaatttgttcgcgttgttgagatgttaaatctggatccatttacgctgttagttctctttctgcatccgaaccttttcttcacttttttgttgtgtattatttgtgtttcgttctgtattgcttcagagatttgccgatctgtgtttgctttatgttttatgtgaacatttttttgcggtttagtttcgattgattctcagatgtacgtgtacgctgtgtattttgcgaacttttggatctggttatgtgttgttcgagtgatttggaatgtggatttgatgataacgccttgtttgtttaaattattttatttacagtttttgttgatatttatcattttatttcaaatggaccaaaaaccgagatgcatttctctaagtgttttgatgctgtttttcaactggaatttgagtttcgtcttagtaatttgtgtttattatgctgatttttgaaatgaaactctaattttaattggaaaataccctaaaaatactgagggaatctccgatttgcccatttcgaatccgtgttttattgttatgatggtctgtggatatggatgcagccaggatttgactctggtagtactttctggaggaaaaaccctgctttgtcattcaattaaaagttatttatcttttgattggaaatctgaatgtattctggttgaggaaaaacttttttcaactgtcacttttgagttttgaacacacggattctcttttcaagaagataaactacaaattctaatgtgatctatgttgtatgtgttgtttcagcctgatgggcagatgccaagtgacaagaccgttggtggaggtgatgatgctttcaacaccttcttcagtgaaactggggcaggaaagcacgtgccccgcgcgatttttgtagatcttgagcccactgtgattgatgaggttaggactgggacataccgccaactattccatcctgagcagctcattagtggaaaggaggatgcagcaaacaactttgcccgtggccactataccagtaatgctgctcctctcctttcattgcttcgaatataactgcatttgcaattttactgtgttgaattgaatatcatactaagaaggttgtttttgattcagttggaaaggagattgttgagctttgcttggaccgcatcagaaagcttgctgacaactgcacaggtctccaaggttttctggttttcaatgctgtgggtgggggaactggctctggacttggttcccttttgctggaacgcctttcagtggactatggcaagaagtccaagcttggtttcactgtctatccttcaccccaagtttcgacctctgttgttgagccttacaacagtgtcctctccactcattctcttcttgagcacactgatgtggctgtcctgctcgacaatgaagccatttatgacatctgcaggcgttcactggacattgagaggccaacctacaccaaccttaatcgtttagtttctcaggtattgttattgtctgaattagaaattagaaataactagtgcttgtgttgagctgtataatatgccctttaattaacgttctgttgttttatttaggtgatatcatcactgactgcttccctgaggtttgatggagccttgaatgttgatgtcaatgaattccagaccaaccttgtgccataccccaggattcattttatgctttcatcttatgctcctgtaatttcagccgagaaggctcaccatgagcagctatcagttggtgaaatcaccaacagtgcattcgagccatcatctatgatggccaagtgtgatccccgccatggcaaatacatggcgtgctgtctcatgtacagaggtgacgtagtgcctaaagatgttaatgcagctgttggaattatcaagaccaagcgcactattcaatttgttgactggtgccccaccgggttcaagtgtggaatcaattaccagcctccgactgttgttccaggtggtgatcttgccaaggttcagagggccgtgtgcatgatctccaattccaccagtgttgttgaggtcttctctcgcatcgaccacaaatttgacctcatgtatgccaagagggcgttcgttcattggtatgttggtgagggtatggaagagggggagttctctgaggcccgtgaagatcttgctgccctggagaaggattatgaggaagttggtgcagaggcaactgaagatggtgatgaaggagaggattatgattagaagtttgcactattatgttactttctgtgttgtttttcttctcgtgctctgtgtatcgttgtactttccgtggaacttgccttgttccggtacttttggagctttatgtgaagtgtggtgaaaacatttatttgaaa

SEQ ID NO: 176 - DNA, 2078 bp, Glycine max
  source 1..2078: mol_type = genomic DNA
acaatggtgacagactcacaatcgaacgggaaaaggcgtcttcataaacgccgcccaaaacttctcatacccttttattcattccattcgtttctagggttttcttttctttgccgagaaaatgagagagtgcatttcgatccacattggccaggccggtatccaggttggaaacgcctgctgggaactctattgccttgaacacggcattcaggtatggtttcaaatgattttattaggtttcagtttgggcttcggcctgggcttgggcttgggttttaatgttcttttttttttttttgtgttcagcccgatggacagatgccgagtgacaagaccgttggcggaggagacgacgccttcaacacatttttcagcgagaccggcgccggaaagcacgtgccccgcgccgtcttcgtggatcttgaacccaccgtgatcgacgaagtccgaaccggtgcgtaccggcagctcttccacccggagcagctgatcagcggcaaggaagacgccgccaacaacttcgcgcgtggccactacaccatcgggaaggagatcgtcgatctctgcctcgacaggatccgaaagctcgccgacaactgcaccggtctccagggtttcctcgtcttcaacgccgtcggtggcggcaccggttctggcttgggctcgcttctcttggagcgtctctccgttgactatggaaaaaagtcaaagctcggtttcaccgtttatccatcccctcaggtttcgacctcggtcgtggaaccctacaacagcgtcctttcaacgcattctctcctcgaacacaccgatgttgctgtgcttctcgacaacgaggcaatctacgacatttgcaggagatctcttgacatcgaacgccctacctacaccaacctgaaccgtctcgtttcccaggtatacagtcaaacctttttcataaccgaattttcagtcgttaattttaaccgttacttaaacatagaaatggttaggtttaaatgcgtgattgaaatctgattttaataagattttaatgtgaagattttgggttacacactttatgaatgtgtgtgtattcgacttaaaaattcaaattcgaatgaatctggatttcatgtaatgtatttctccatgcattcccatagtttgtaattcgggtggcttactactaatatcgataaatctaaataaaacacattaaaatctgattgttacgatgaactgaatcttaatctgtttggaattggaatttcatttggtgtttgattttgtctaatttaaaatttaaaatttttgtaggtgatatcatccctcactgcctctttgaggtttgatggagcactgaatgttgatgtgactgagtttcaaaccaacttggttccttacccaaggatccatttcatgctttcctcgtatgcccctgttatctctgccgagaaagcataccatgagcagctttccgttgctgagatcaccaacagtgccttcgagccatcctccatgatggcaaagtgtgaccctcgccacggcaagtacatggcgtgttgtttgatgtaccggggcgatgtcgtgcccaaggatgtgaatgctgctgtggccaccatcaagaccaagagaaccatccagtttgtggattggtgccccactgggttcaagtgtggtataaactatcagcctcctactgttgttcctggaggtgaccttgccaaggtgcagagggctgtgtgcatgatttcgaactccactagtgtggctgaagtgttctccaggattgatcataagtttgacctcatgtatgcgaagagggccttcgtgcactggtatgtgggtgaaggtatggaagagggtgagttctcagaggctcgtgaggaccttgctgctcttgagaaggattatgaggaggttggtgccgagtctggtgatggagatgatgatggtgaaggagatgatgattattagagtgtctgaaatatcgtgtgtttgatgtctactttttcgtcttctgtcggacatgtgtggtttttgaatgatgattgttatcaaatatatgtgctatgtatagcacagaagtttctata

SEQ ID NO: 177 - DNA, 2838 bp, Glycine max
  source 1..2838: mol_type = genomic DNA
atcatatttcatttggccccaaaaactgagtttttatatttttagaagaatagcaagaaaagggaagggaggagaggggagagaaaatgccaatattagaaggttgtagatggaattagtgaacatacccgctcaaagcgacacccaaattacacgcacaaccacacctttaaattctccgcagaaggaaaaaaaggaaaaaagataaagaagccaaaagtccctcgttccatttccccctttcctccgcccggcgagaaaatgagagaaatcctccacatccagggcggccaatgcggcaaccagatcggagccaagttctgggaagtaatctgcgacgagcacggcatcgaccacaccggaaagtacagcggcgactccgaactccaattggaacgcatcaatgtctactacaacgaggccagcggcggaaggtacgttcctcgcgccgtcctcatggatctggagcctggcacgatggactcggtcagatccgggcctttcgggcagatattccgccccgataattttgtgttcgggcagtccggcgccggcaacaactgggccaagggtcactacacggaaggtgccgagctcatcgattccgtcttggatgtcgtgaggaaggaggccgagaattgcgattgcttacaaggtctccacaattccattcatttcattttcagggatgctctcacttgtatacattattttcatcgtatcactgttctacgtgggatctccaacaattttgtgtttattttgtacatgattattgtgttcaactgtgatcatttgaatttcattgtgttggctattacagggtttcaagtgtgccactctttgggaggtggaactggctcgggcatgggaacgcttctcatctctaagattcgggaagagtaccctgatcgtatgatgttgacgttttccgtttttccttcccctaaggtgtcggacactgttgtggagccgtacaatgccacgctttctgtgcaccagcttgttgaaaacgcggatgagtgcatggtcttggacaatgaggctctctatgatatctgtttccgtacattgaagcttgctacaccaacttgtaagtttcggatttcttctgttattgttgttgttataattgttgttctgctactgtaggtggtcatgctgctgtgcttgatttttctgtagattaactgttaagcaatgattagtatagtgatgtcgttgacatttcaatttgccatatcattaggaataaatagtactgtatatgtttagggtccccacatatacttgacatctcttttgtttctgattcctgcaattttcttcatcacctgttttggtccttgccttaaacttaacagttaactacatgttttacatccctcttaaaaaaaaacactcgtgttatttttcgtccctgacaaaatataggaattttatttttagttcctacaaatatagtggtttttgtttttagactctgttgttattttctttcaaatatgactatttttgtttttagttcctagttcctactgtaacccaaacaaatgacagcgaatattgctgggataaaaagtgaaaaaaaaaaaaactacaaggattaaaaacaaaagcagcaatatttgcaaggacaaaaaattatatttaaccgatatcattatatttgtgggaggattctagtgagttttagtggtcatatagctggtggtcatggttgttgaaatacttgaatttattcaatcattgtggttcttggtccccttttctaaatggaatataagttgtattaaattttattttattctcatttagttgtgagttcaatttttcatttgttttttcttgtttgttgcagttggggaccttaaccacctcatttctgctaccatgagtggagttacttgttgtctacgtttccctgggcagctgaactctgatcttaggaagcttgccgtgaatctgatcccattccctcgtctccatttcttcatggttggatttgcaccattgacatctagaggatcccagcagtaccgcaacctgactgtgccagaactgactcagcagatgtgggattctaagaacatgatgtgtgcggcagatcctcgccacggtcgttatttgaccgcatctgcgatgttccgtggtaagatgagcaccaaggaagtggatgagcagatgatcaatgtgcagaacaagaactcttcctactttgttgagtggattcccaacaatgtcaagtctagcgtgtgtgatatcccaccaaagggtcttaagatgtcatccactttcattgggaattcaacatcaattcaggagatgttcaggagagttagtgagcagttcacggcgatgttcaggcgcaaggctttcttgcattggtacactggtgagggaatggacgaaatggagttcaccgaggccgagagtaacatgaacgatctggtggcagagtaccagcaatatcaggatgctactgctgatgaggaagagtatgaggatgaagaggaggaggcttaaggcatctgagttgccaaggttgtatcgaattgtaacgtggatggatggctttcagcgagtttaaaatgtggagcagtaaaaaaacattgacttgttcatgtgtttgctgtatgaattgatgagggtcattgtttaacctgggttctgttgagaatgcttatttttaagtcgtcgaatgttctacaggtagatgaatatatacatcgacgatggcagttctcgtatttatattccatttaccctttttctgtcgatatgttgattatgtttggtcggcattgaatcaaacaagaatgcatccgattcccatta

SEQ ID NO: 178 - DNA, 2833 bp, Glycine max
  source 1..2833: mol_type = genomic DNA
actagttatgtgttaaacaataatgtatcaaatttcatttgagcccaaaactgaatttgatatttttagaagaacggcaagaaaatgcaaatattggaggagatgaggtggttttggacactcccaaattacacgcacaaccacaccttttaattctccgcaccaatcttttagaagataaaaagcgaaaagaggttcgttccatttcccgcttcttcttttttccctcacttttccccggcgagaaaatgagagaaatcctccacattcagggcggccagtgcggcaaccagatcggagccaagttctgggaggtgatctgcgatgagcacggcatcgaccacaccggaaagtacagcggcgactccgaactccaattggaacgcatcaatgtctactacaacgaggccagcggtggaaggtacgttccacgcgccgttctcatggatctggagcccggcacaatggactcggtcagatccgggccgttcgggcagattttccgccccgataacttcgtcttcgggcagtccggcgccggcaacaactgggccaagggtcactacacggagggcgccgagctcatcgactccgtcttggatgttgtgaggaaggaggccgagaattgcgattgcatgcaaggtctcctcaattccattcatttcatttcattttttcttacaatttcactttatatagacatcgtttttttaaattgcggttgcagtgagccagaaaacctttacaatgcgtcgatgtggggtcttcaacaatttattgtttgcaattgtaatcgtttgaatttcattgtgttggttttgacagggtttcaggtgtgccactctttggggggtggaactggctcgggcatgggaacacttctcatctcgaagataagggaagagtaccctgatcgtatgatgttgactttttccgtttttccttcccctaaggtgtcggacacagttgtggagccgtacaatgccaccctttctgtgcaccagctcgttgaaaatgccgatgaatgcatggtcttggacaatgaggctctctatgatatctgttttcgtaccttgaagctcgctacaccaacttgtaagtttcggatttctttgtttgaatttttgtaaaacttatggtgtcattgtagcggttattgttgttgttctgctactctaggtggtcatgctagtgtacttcatttttctgtagattaactgttaagtaatgattggtacagtgatgtcgttgacatttcaatttgccatttaagttagtaatttacgaaaacatatcattaggcctaacctatatatgttttgagtccctacatatgcttggcatttcttttgtttctgattcctgcaatcttcttcatcacctgttttggtccttgccttaaacttaacagttaactacattttttacaaatataggatttttgtttctgattcctgcaatgttcttcatccctcttaaaaaaaacactcttttgttattggtattttatgtccctggaaaaatatcggaattttatttgtagattctactgttattttcttttaaacatggctatttttggttttagttcctactgtaaccaaaacaattgacggcaaatattggagggataaaaagtgagaaaaatgctacaaggattaaaaataaaaaatactgcaatatttgcaagggcataatttaaaccggtatccttatatttgtaggattttagtgggtttaggccttatgtttcagtcatagctggtggttatggttgttgaatactagaatttattttattcagtcattttggcctttagtccccttttctaaatggaatataaattgtattatatttgattctcatttagttgagttcaatttttcatttgttttttcttgtttgttgcagttggggaccttaaccacctcatttctgctaccatgagcggagttacttgttgtctacgtttccctgggcagctgaactctgatcttaggaagcttgccgtgaatctgatcccattccctcgtctccatttcttcatggttggatttgcacccttgacatcaagaggatcccagcagtaccgcaacttgactgtgccagaactgactcagcagatgtgggattctaagaacatgatgtgtgctgcagatccacgccacggtcgttatttgaccgcatccgcaatgttccgtggtaagatgagcaccaaggaggtggatgagcagatgatcaatgtacagaacaagaactcttcctactttgtcgagtggattcccaacaatgtcaagtctagcgtgtgtgatatcccaccaaagggccttaagatgtcatccactttcattgggaattcaacatcaatccaggagatgttccggagagttagcgagcagttcacggcgatgttcaggcgcaaggctttcttgcattggtacaccggtgagggaatggacgaaatggagttcaccgaggccgagagtaacatgaatgatctggtggcagagtaccagcaataccaggatgctactgttgacgaggaagagtatgaggatgaagaggaggaggaggcttaaggcgtctgagttgtcaaggtggtatcaaattgcaatgtggatgaatggctttcaacaagtttaaaatgtggagcagtcaaaaaacattgacttgttcttgggattgttgtatgaattgatgaggatcgttgtttaacctgggttttgttgataaagcgtattattaagtcatcgaatgttttagtaggtagatgattatatacatcgacgaccgcagttctcgtatttatattccatttaccctttttctgtc

SEQ ID NO: 179 - DNA, 2468 bp, Glycine max
  source 1..2468: mol_type = genomic DNA
gagaaacggaagattcgaccagagaagcgtcttaataaacgctaacctctgtacccttcgctaaaatgagagagtgcatttccatccacattggccaggccggaattcaggtcggaaatgcttgctgggagctctattgcctcgagcatgccattcaggtaataaatctttcacattgcccttactagatactaatattcaaatcttgaaccattctctgtcactccgaatttcacattcaatatatcacaattgctcatcatttcaccataaaatctagatctgtttcggatattactcatcaaactacacataatatgacgttagttcttttttttttcttttttaaataatttgtttataattcgaattctgtgttgtttatggtcaactcagcgttaatccactttgatctaacgtcctcccatgcacaatctacagctataccttcgtaaccatctacgtgcattctttgtaaccaatgttgcatttgttgagcgtactagttggaaatttaaaaagtttctttggttggagtggatgctgagcgttactgtgttgtttttttaggctgatgggcagatgccaagtgataagaccattggtggaggtgacgatgctttcaacaccttcttcagcgagaccggtgcaggaaagcacgtgcctcgtgcagttttcgtagatcttgagcccactgtcattgatgaagtcagaactggcacataccgccaactcttccatcctgagcagctcatcagcggaaaggaagatgctgcaaacaacttcgctcgtggccactatactagtactgtttctttccccatttgcacccatttcaaaaattgtgccttttctttgattgtgtaataagaaattaacaattttttttttcttatggtgatctcttaattcagttgggaaagagatagttgatctgtgcttggaccgtatcagaaagcttgcggacaactgcactggtctccaaggttttctggttttcaatgctgtaggtggtggcactggttcaggtctaggatcccttctcttggaacggctttcagtggattatggcaagaaatccaagctgggtttcaccgtctatccttcaccgcaagtttcaacctctgtggttgagccttacaacagtgtcctttccacccattcccttctggaacacactgatgttgccgtgctacttgacaatgaagccatatatgatatttgcaggcgttcccttgacattgatagacccacttacacaaaccttaatcgcttagtttctcaggtttatgtttcttcaacacataaattgaaacaaactctgcaatatcattttatgagtaaaccatcaatttagtctttcaagtattaccctatttgtcaaatagtccttaaattaatgaaattatgtaagtagttcccaaagtattgaatatctatcaatttagtccctatgttgacaatatgatacattttactaacatctagggatcaatttgaaggattttttaagacttgggagactatttaagagaaaagagtaaaaatttagtgatgaaattgatggttcattatcgggttttatgacatgtgatctgactttcttatcatcatatttttcaggtgatatcatcactgactgcatctctgagatttgatggtgccttgaatgtggatgttactgagttccagactaacctggtaccatatccgaggattcacttcatgctttcatcctatgctcccgtgatttcagcagagaaggcataccatgaacagctttcagttgcagagatcacaaacagcgcgtttgagccgtcctctatgatggccaagtgcgaccctcgccacggcaagtacatggcttgctgtctgatgtacagaggcgatgtggtccctaaagatgttaatgcagccgtagccattatcaagaccaagcgcactatccaatttgttgattggtgccccacagggttcaagtgcggtatcaattatcagcctccaactgttgttccagggggagatcttgccaaggtgcagagggcagtgtgcatgatctccaactccacaagtgttgctgaggttttctcacgcattgaccacaaatttgaccttatgtatgccaagagggcgtttgtgcactggtatgttggtgagggcatggaagagggtgagttttctgaggctcgtgaagatctcgctgcccttgagaaggattatgaggaggtcggagcagaggctacggaaggtgatgaaggcgaggatggagatgagtattgattaaggactttgcatttttagttacgttttcgtgatgggtttcttttatgtagtttccttggctttattttctaagttgttgccatatgctgctgttatttgcatgaatggtttgtcatttggtggagcttgctctgttccagcactaagcaacttcaatgatatgattgtggctcttttagttaaaa

SEQ ID NO: 180 - DNA, 3189 bp, Glycine max
  source 1..3189: mol_type = genomic DNA
atgcctgcttactttgtgccgagctatgacatgaaatttacagcaaaggagacaaggacttgtgcccccacagataagttgcaaaaccgacccaaacaatgaaccccttcaactccaccgagcagttatcttatctccaaatgagggtcccccactttattattaaaaactcttcaataatttaagatatttgtcaactgtaaaagtttgtaaccatttgactatttagccatcccttcatatattgtgattatgttattatgtcaaattataactccaaggaaataaaacaaatacaatcaaagaatcttctttgctttctctcctttgcactttccttctcctccttgtgattttttgtttgcatcaaagggagaaactgggagacacagaagatgagagagataattagtattcatattggacaagctggaattcaggtggggaattcatgctgggagttgtattgccttgagcatggaattaaccccgatgggaccatgcctaggtacactgccttatatgatcattgctgtattatgtgttgtttacattaattatgtatcttcatggaattggcttgattctttaggtcttttgagtttggtgtatttttttcactcaatttttggccttgaataaaaaaaaaaaagaagcttaatttgattgattttcaacatgattgtcttacttgctcaattagatgtaatccttaaacttgatatattttccaaagtgcatctagggtccattatttagcactctgccaaattggaaaactagggatatcacttcaatttggatcaacatattactactctgatctatagttatatgtttaaatgtaattctagaatcttataatgtaactttctcatgttgtttctatcattgtttcccattaattggttgagttattgtggagtactctcggtggggtcttagaccaaattcatattgaatgaattttatcattttctaagcttataatttctcattactctaaaactagaacttgatttttgttttgacttatccattctaattatttttcctaataattgacatttatatctgcttaattgcagtgacacctctgttggcattgcacacgatgctttcaacaccttcttcagcgagaccggattcggcaagcatgtgccaagggctttatttgttgatttggaacctagtgttattgatgaagtaagaactggtccttacagacaactctttcaccctgagcaattaatttctggcaaagaagatgctgctaataactttgcaaggggacactacactggtaagtcaattttttctgatgcagataaaaaaatggctaatctcttccttgtttagctggacaatgccacttactgtgtatctatgctgcagttggaagagaaattgtcgaactatgcctcgatcgtatcagaaaattagcagacaattgcactggtttgcaaggattcttggttttcaatgctgttggcggtggtactggttctggtttgggatcattgctgttggaacggttatctgtcgattacgggaagaagtctaaacttggttttaccatctatccttctcctcaggtatttattttcttaaaatcattggaaaataacaaagaaagtaaaaagatctgtttgtggtgcatcaaacaaacacttgttaacatcattctgtcttctgattttccagtctttgattcaggacagtattcctgtaggaaatatatttcttgcctgagtaatcatattcaaatggaaacaattccagtgaaatatagtagaatgccccctattttatttttgaatattctaagatacaatgtagcattgccgccacaaaggaaactacctagtaggcttaaattaaaagagatacagatactttttctcagttgttgctcaacatgctcttgggatttcttgattttgttaactcatgttctattgtttggttattaattgtttatatgtgcatattgttattgattatccatgtggaatgcctttatggtagtactgtttttcattcaggtatctactgcagttgttgagccttacaacagtgtcctttccactcattctcttcttgagcacactgatgtggttgtgcttttggacaacgaagcaatatacgatatctgcagaagatcattagatatagaaaggccaacttacactaacttgaaccgtctgatatctcaaattatctcttccttgaccacttccctgagatttgatggtgcgattaatgtggacattaccgagttccagactaatctcgtgccatatcctcgtattcacttcatgctttcatcttatgcccctgtaatatctgctgcaaaggcctaccatgagcagctatctgttcccgagatcaccagcgctgtttttgaaccatcaagtatgatggctaagtgtgatccaagacatggaaagtacatggcatgctgcctgatgtatcgcggagacgttgttcccaaagatgtaaatgcagctgtttcaaatatcaagacaaagagaacagttcagtttgttgactggtaactaaacttccttggagtgtcttattattagttatagtttagtatgtgttccttgcctaatggtttttgttccttctattgtaattctaacatgatacttagtccaataattgctagtttggggacatgttctttggagttttccattttttcttgacaaaaaatcttataaggtgatttttatggcaaaattcaggtgccctactggattcaagtgtggtatcaactaccagcctccaacagtggtaccagctggtgatcttgccaaggtgcagcgggcggtttgtatgataagcaacaacactgctgttgctgaggttttcgcgcgcattgattacaagtttgacctcatgtatgccaagagggcatttgttcattggtatgtgggtgaaggaatggaagaaggtgaattctctgaagcccgtgaggatcttgctgctcttgaaaaggactatgaagaggttggagcagaaggcgaagaagaagaataagaagaacacgacgattactcgaaatagagtcaatcattcatcaacattttcaccagctaccttacctacatctcccttcttttctctgtctaatgtctgtccttgtccattgaattttaagcatttttctgttgtgtgcta

SEQ ID NO: 181 - DNA, 2618 bp, Glycine max
  source 1..2618: mol_type = genomic DNA
aactaaccgtggttaccaagttaggttacgttggatagatacagcgcaaccattgctcacgcaccgtgaaccaaccctggttacagataaccacagcacagctaccccatacatctccctataaaaccaatcccaaatcctacgaacgctcctcacttccagatttcaaagaaggcgtcttcataaacgcctttcttctccgtttccgtttcctcgttcgaattcgctttttgatctgcgaaaatgagagagtgcatctcgatccacattggtcaggctggtatccaggtcggaaatgcttgctgggagctctactgcctcgagcacggcatcggggtgagtcttcaatctcaagcatcgttagtcttacttttttcgatttttgattcagatctgtgctgtgaaggcttgtttcgtgcatttcgctgttgacatttgtatccgtttctcagatctaaggaaatttgaacgttgtttttgaaatttcagatgtttatggtttttctcttagatccgtgcgttttgaactctagcttgttggcattgtgtttgaaatctgatcatttttccgtttattattactatagatccgttctcttactattgcgttttcgcagcttgaaatcacatttttttccgtttgtcctaccagatctgttttgttagtgcattttctaaatcgtttatagagctgtaacattttgtaacctggctgctttatgcttgctgttcaacttaaactgtgctttcgttttccgtgttcggatctgtatgagtagctagtgaatcatttttattagatcgttctgattaaatcgttttgtttaggggttagattttatgtttatgcttctggagttgttggagtaattgctcttcaatcaaattacgaacaattacgtatactgtttggtgaaatttttaatgtgattttgaaaaatgtatttatggaatgctgatgtttagaattgctatttctgtgcagcccgatgggcaaatgccaagtgacaagacagttggcggtggtgatgatgctttcaatactttcttcagcgagactggtgctggaaagcacgtgccacgtgcagtgtttgtagatcttgagcccactgttattgatgaggtgagaaccggaacttaccgccagcttttccacccagagcagctcatcagcggcaaagaagatgccgccaacaactttgcccgtggccattataccagtaagtcactacatttatcatacgtgaatttctaatgtggggttattaatataatttcgttatacctaacgtgttatgtttgtttggtaccttatcagttgggaaagagattgttgatctgtgcttggaccgcatcagaaagcttgctgacaattgcactggactccaagggtttttggtcttcaatgccgttggtggaggaactggttctggacttggttcccttctcttggagcgtctctccgttgattatggcaagaaatcaaagcttggtttcacagtctacccctctcctcaggtgtccacctctgttgttgagccatacaacagtgtcctctccacccattctctcttggagcacaccgatgttgctgtcctcttggacaatgaagccatttatgacatctgcagacgctctctcgacattgagcgtcccacctacaccaacctcaaccgccttgtttctcaggtaatgatatgcataagtgaatgtgatttcttgcaatcatttgtgattaatatcaattaacttgatttactgttctttgtattaattaattaatgtatcttttgttggtgtttaggtgatttcatctttgactgcttccttgaggtttgatggtgccctgaatgtggatgtgactgaattccagaccaacttggtcccataccctagaatccatttcatgctttcctcctatgcaccagttatctctgctgagaaggcctaccatgaacagctctcagtggcagaaattaccaacagtgcttttgagccatcgtccatgatggccaagtgtgatcctcgtcacggaaagtacatggcgtgttgcctgatgtaccgtggtgatgttgtgcccaaagatgtaaacgctgctgttgccaccatcaagaccaagaggaccattcagtttgtggattggtgccctactggtttcaagtgtggtattaactaccagccacctaccgttgttcctggaggcgaccttgccaaggtgcagagggcagtttgcatgatttcaaactccaccagtgtggctgaagtgtttggccgcattgatcacaagtttgatctcatgtatgccaagcgtgcttttgtccactggtacgtgggtgagggtatggaagaaggtgaattttctgaagcccgtgaggaccttgcagcccttgagaaggattatgaagaagtgggtgctgagtctggtgagggccaggaagaggatgaagactactagaatctacttcagattcttgttcttgtggtctgttttctgttgtgtttgatgttcagatgtgtaccagtaccgatgtggttttaatttggatgcattgcttttatgcttcgctgctcctgttacgtacctaaactgaatggcaatattgaactatgttgtttta

SEQ ID NO: 182 - DNA, 3523 bp, Glycine max
  source 1..3523: mol_type = genomic DNA
tattaattaaacttctattcatttttattttccacttgacacaaagaaaggcaagtaccatttttatcaatcttatcacccttttgcattgcacctacaaaagggccaccccttcttcccttctcaacttgtacttcatctaattcaatactacaacttctgaatcacttagttgaattgaattatcttcaaaatgagagaaatccttcatgttcaagctggtcaatgtggcaaccaaattggaggcaagttttgggaggtgatgtgtgatgaacatgggattgatgccactggaaattacgtaggcaattcccatcttcaacttgagagggttaacgtgtactacaatgaagcaagtggaggacgctatgttcctcgagctgtgcttatggaccttgaaccagggaccatggatagcttgcgttctggtccttttggaaaaatattcagacctgataatttcgtgttcggccaaaatggagctggtaacaactgggctaaagggcattatactgagggagctgagcttattgattctgttcttgatgttgttcgaaaagaagctgagaactgtgactgcttgcagggtactactacttccttagttaattcaagttctaagtaaattgataaatttattgtccatacattcagacatgttattgttatgtccttttgcactaacaaaattttgatgctgttacttaactacttttcatgttgttctctaactagagtagtagtttcaccttagtttatatgtagttcctaaagtacttttcatgatgttctctaattagaatagtagttttacctcaataacatatattttatttcgtgaattaataaagtgaagttttaattctgattgaaagataacagaaaaagcaattaaagaaatatgtctaaatttgatctattttaaaggacaaagttttgctacaattctttaaatacttttttgttttgttcctcaatcaaaattagagttttacttggtaacgtaagttaatatttaattgaacctttattagggtaaaattctaattctgataggaaaacactaggaagaaaggaatgcattcaaattttgtcttttttataaagctgttgaattatttatggttttatgtatatgagaattgtctgtttgatgatcatgacagggttccaaatttgtcactcactgggaggaggaactgggtctggaatgggtaccttgcttatctcaaagatcagagaagagtatccggataggatgatgttgacattctcagtgttcccgtctccaaaggtctctgacaccgtggttgaaccctacaatgccactctctctgttcatcaactagttgagaatgcggatgaatgcatggtccttgataacgaggcactctatgatatctgtttccgtacactcaagctcacaaatccaagttgtaagtattgtcaccccacatgatttattatctacaataaagtagtaaaccgcacatgaaatttcacattaatgaaatagccaatgaaaacgccagagtatgttggagcagagtactttaattggaatatctttttagggggggtaggtattagctatctctattttgatcggtaatatatatgttgagtttaatttggactaatttaaaaaattcaacaatcattttgttactaattgcaaaccgcatttcttgtgtgttaatttttcatcatcaataatgttttcttaacgtcatttttactttacactctcttatatactcagagagatgaaggagagaaaaaacaaagagaagtaaacagttttacagagggtgtaaaagagagtaacaagttaaaactgatgtgttagttcttctttcagtgctcaaaggtcaccaataaccaatttacaaaaagtaagaatcctgattttcgttactattttctttttttgtgtcgtgcaaaatggttttaaatttcaagtgtagttgtagacatggttgcattgcaatcaacaatatttcaagtaatgtaaaaaaaaaagtgtataagaaataaagcattcattcttggacaacaatgacacttataagggaaagagatgttgagtaggaagaaaatataaaaagaaatgatgaatgttaataaggtgcgtatgaaattacgaggtgtacgagaataatatataaccttttaaattaatcatcttgcagtaaggtttaatctcttcaagagtagtgaagtcaaagaatagatcctttctaattagatttgaatgaatgagtttgtttcacattgtttggcatatgaggggttaaacaccgatttttttttttagagtttctactcaacatcattggacttcactcaatccaacacacgtacaaaaaaaaatatgcattaattgttagatatgacatgcaaggagtaacgtacgtgtgcgtttttgttggtggcattgcagttggtgatctgaaccacttgatctcaacaacaatgagcggggtaacgtgctgcctccgcttccccgggcagctgaactccgacctccgcaaactcgccgtaaacctaatccctttccctcgcctccacttcttcatggtcggtttcgcgcccctcacatcccgcggctcccagcagtaccgctccctcaccatcccggaactcacccagcaaatgtgggacgcgcggaacatgatgtgcgccgccgatcctcggcacggcaggtacctgacggcgtccgccatgttccgcggcaagatgagcaccaaagaagtggaccagcagatgatcaacgtgcagaacaagaactcctcctacttcgtggagtggatccccaacaacgtcaagtccagcgtctgtgacatccctcccacgggcctctccatgtcctccaccttcatggggaactccacctccattcaggagatgtttcgccgcgtctccgagcagttcactgtcatgttcaagagaaaagccttcttgcattggtacactgccgagggaatggatgagatggagtttaccgaggctgagagcaacatgaatgacttggtggcagagtatcaacagtatcaagacgccgccgccagcgaagaaggcgagaacgagatcgatgacgaggaagccatggctgcatgagagcctcattaaagcctctccggaagaaattattatataatctagattaccacgtcatcatggtcgactcaattttcactgttacattaatcaaaatttttaatatacaataacaaattttgattagatgcaatgtgaagattgatcaaaattattactatttaatgatttctagtgatgtcatgagaaatgcaaatcaaaacacttggtatatgccatatggtgatggtaagggaaaggaaaggaaaggatgtgtttgtatagttaatgctaggtacatatgagatgtggggtgagtagtattttttacggattttgttttgatatttttctttcttattggcttcgttgtgggttttgtttgttattgttaatgctattatttcatggcgtttgttttgta

SEQ ID NO: 183 - DNA, 3583 bp, Glycine max
  source 1..3583: mol_type = genomic DNA
ccgagagataacgtgagcgaagttatgcgctggtatggttggtagcggtagcatggctgtcacccttgaggaatgaacggcacagaataccgcacttgaaaacaaaatatcccgccatccattattaccatcctaacctccgaatatccctctctctctctttcttccataaatcactccactctctgtaacgcatcgcatttcatttccctcccccaccctcaccaccaacgccaaacaagccctaaatctctcttctctttcttcttcttcctttaaccatgagagagatcttgcacgttcagggaggccaatgcggtaaccaaatcggttccaagttctgggaggtgatctgcgacgagcacggcatcgatcccaccggaaagtacaacgaggaaggcaacagcagcatccaactcgaaaggatcaatgtgtattacaacgaggcctctggcggaaggtacgttccccgtgccgtgcttatggatctcgaacctggaaccatggacagcatcagatctggcccctacggcaagatcttccgccccgacaacttcgtcttcggccagtccggcgccggtaacaattgggccaaaggtcattatactgaaggcgccgagctgatcgactccgttctcgacgtcgttcgcaaagaggctgaaaactgcgattgcttgcaaggtatataaaatgcacatttcacatttcaaatatctgcatttaacctcgttcaatgctactgagccgtaatgcttgagcgacgatgaatctccagatctgtttcatttctgtgttgacatttctctctgttttttgaatatcgttgatctattcttcaaacggtggtttatttagcattataatagacgtttatggatctgcaaatttctcttggtcgcatggatgatagtgatatagatctggatagcggatttagaggttaaagataaacagagcataagatcctgtattctaattaaatccaaatggaagaatgagtatgctcaatttgattgtatatttgcttctaggagatccaatgtacatgttcaacgcaacctacataaacaaaagtgctgctagtttttgctccgttgttggatgcaacacctttaattgcctgtagactgtataaacacgcattcacattgtcatcaatttgtaactgtaggatgaagattggacgattcataatttctctataaaccagatttgaaatatgcgtttaagatctgagccattcaatcttcatccaaccgttttttatatgtagatctataatataataactaataagtcaaagaataattatagatctggagtagtatccatgtatcaggaatcgggattttctttatgtcatctttctgctgcaataattgctgtctcaaatctcaattattattattttcatttttttttcttgtttgacattatgcatctggattgcttgtttttagggagaaaatgacagggctgagatgttaaatgtggcccctgttgtctagaatgacgacaggcagggaccaccttatcttttatagtgcttaattaattaaataaaaatatataaaatctgtttattttgtagtaacattttcgcgtgatgatatttgactattgttttaaaatgataataataatccaacattgatattctcttcctatctttactatctcaaataagcaaagtttaattattttggtgtgttatatatatatatattggatttttttcgcttattctcaaaatagtgtactacatacatgaaagtgtgtacacaacttggaactttagttacagtagcaagtcactgtagtatattagtttaccccctgcatctgaattcaaaaattgatttggaaaatactttgcatactaaaacaatgcagattcgtgaaacagttttgtttaattttgctcaactataagttattattttgacagtgcttgcaatagtgatctaggagccacatagcactacatagtttccagataccgcttaatttggcttctattgggttgtgctatataactcaactgtgttcatggttccttcgcttagcagggctcagaacagaattcggttggtgtgctttcatggtcttgaaatgtgggctctatgagatcatgaatttaattcgaaatgcttccatgtggaatataatttttctcctgcttggttcctgctgcagtaaatctgattattgatagtttaataattatctcaaggttacactaacttgctttttttgtcatcttttattctgaaatctgaaagtttaatttaatttcctcaggttttcaagtttgccactctcttggaggaggcacaggttctggcatgggaacactgttgatatcaaaaattagggaggaatacccagacagaatgatgctcactttctctgttttcccatctccaaaagtttctgatacagttgtggagccatacaatgccactttgtctgtacaccaactggttgaaaatgcagatgagtgcatggttcttgacaatgaagcactttatgacatttgctttaggacattgaaactcagcacccctagctgtaagtattatcccctctgttgtacacaattgctctcagattaggcagatataaataataacatccgttgatttctctcatggattaattgtagttggtgatctcaaccatctgatttctgcaaccatgagtggggttacctgttgtctgaggtttcctggacaactgaactctgacctcaggaagctggctgtcaatctgattccatttccccgtcttcacttctttatggtggggtttgcacctctcacttctcgtgggtctcagcaatatgtctcccttactgtcccagagctgactcagcaaatgtgggatgccaaaaatatgatgtgtgctgctgatccccgacacggccgatacttgactgcatctgctatgttcaggggaaagatgagcaccaaagaggttgatgaacaaatgatcaatgtgcagaacaaaaactcgtcatactttgttgaatggattcccaacaatgtgaagtccagcgtttgtgatattccacccaggaatttgaagatgtcatccacatttattggcaactcaacatcgattcaagagatgtttaggagggtcagcgagcagttcactgctatgtaccggcgcaaagccttcttgcactggtacactggggaggggatggacgagatggagttcaccgaggcagagagtaatatgaatgatttggtagcagagtaccagcagtaccaggatgcaacagcagaggaggatgaatacgaggatgacggtgatgagcagcagtatgatgaccagtagctggatcaatcttagggcaatgctctgatggtaattaccaatggcgtgatgataacttctggcaccgatctacttttactgctattcgtgtatctacagccatatgaactctatttcattcccatttatctcttcttttaaattctgctaatttcatttatatgttctgcttttgaattgtttggaatgtgcccggtgagacaatagttgattattctatacttccaattgccaagca

SEQ ID NO: 184 - DNA, 2363 bp, Glycine max
  source 1..2363: mol_type = genomic DNA
agaagattcaaaattttccgttcgcttttcaaattttaaattcccccttaaatccaacggctccgtcaaattcctccgttaactgctgagccaccacttaacggcgtcacaagtccgtcctataaaaaaactcttcttctcgcagtttcttttcacggacgagggtttcgtttcgggtttgacgttgttcacaatcactttctgcgcttcactcactcccttcgtgcggttttctttctttgtcgaactcgtgcgaaaatgcgtgagattcttcacatacagggagggcaatgcggaaaccagatcggagcgaagttctgggaggtggtgtgcgcggagcacgggatcgattccacggggaggtaccagggggacaacgagttgcaactcgagcgagtcaacgtctattacaatgaagcgagttgcggaaggttcgtgccgagggcggtgctcatggatctagagccagggaccatggacagcgtcagatctggtccctacggtcagattttccgacctgataacttcgtcttcggccagtccggcgccggaaacaactgggccaaaggtcactacaccgaaggcgctgagttgattgactctgttctcgatgttgtcaggaaggaggcagaaaactgtgactgccttcaaggtataacttactctaacttcctctcgttgcgacttttttttagggttttgtctttgtttttagggttcttgcgtttctgctattattttttcgattggagtttgtttgttagtgtttgagagttgtttgtatggttttgagtgtgaatcgatggtctccgtggtgtttatcttgtactgttgctacgaaggagtgaagctaaagtgtatgtattatttagcatgagtcttgatctggaaaatctcgtttgattttactggttttgtagtatagtaatgtttgccgttaattggttgttctaatttttgtaaggctttgttagcgttgttttcgcctgttctgtgtattttgaaaataaaatttagttgaaatggcgaggtgtgaatactagttatctacattgttcattagtttttcatttgttggatttgagtgaagatatgcttgaactatgtgagttaaaaattgccgaattgaattatttccttgcgagtgtacgagtaatactgacatttctgtgctctgttgttatgtttatgagcaattagcgtgctaaaagaagtttgcgtgttttttcagggtttcaggtttgccactctcttggtggtggaactggttctggaatgggaacactgttgatctcgaagatcagggaagaataccctgaccgaatgatgcttacattctctgtgttcccatcccctaaggtttctgacacagttgttgagccttacaacgcaacattatcagtgcaccagctcgttgaaaatgcagatgaatgcatggttttggataacgaagctctctatgacatatgcttccgcacccttaagctcaccaccccaagctgtgagttcatctcaccaattcttttgcctgtgatgctttttcatctctttgattcatttactgacattgtgcgtttgttcttgtttctgaaacagttggagatctgaaccatctaatttcagccaccatgagtggtgtgacatgttgtcttcgattccctggtcaactcaactcagatcttcgcaaactcgccgtgaatctcattcccttccctcgtctgcacttcttcatggtgggatttgccccactcacttcccgcggttcccaacagtacagggctctcactgtccctgaattgacccaacaaatgtgggatgctaagaacatgatgtgtgcagctgatcctcgccacggtcgttacttgacagcttctgcgatgttccgtggaaagatgagcacaaaggaggttgatgaacagatgatcaatgttcagaacaagaactcatcgtacttcgtggaatggatccccaacaatgtgaaatccactgtctgtgacatccctccaactgggttgaaaatggcatcaaccttcattggcaattctacctctattcaagaaatgttcaggagggtgagcgagcaattcacggctatgttccgcagaaaggccttcttgcattggtatactggagaaggtatggatgaaatggagttcactgaagctgagagcaacatgaatgaccttgtgtctgagtaccagcaataccaagatgcaactgctgatgacgagggctatgagtatgaagatgaggaagaacctcaggaagatgaggcttaaaacagtgtagtagtgttttgcagggtgttcttgtttgtgtgttttgttgtgatactctgtttaacgttgtgttttttttcatca

SEQ ID NO: 185 - DNA, 2895 bp, Oryza sativa
  source 1..2895: mol_type = genomic DNA
agtgcggggatcgcaaaccctaagccgagacaacgcagagaaaggcgtcttcgtactcgcctctctccgcgcctccgcgcttttcctcctcctctcccctctctcccttctccgccgccgtcgcagcatcaacccaatccgccgccatgagggagtgcatctcgatccacatcggccaggccggtatccaggtcgggaacgcgtgctgggagctctactgcctcgagcatggcatccaggtacggatccgcgtcccatctccctcaccccccgtgttcttcgtgcctgcttctgggtcagatctgggtggattcgcggttgttggatgtggggggctgtgtttatttgtcggtggatctggttgtctggatctgcgttttctctgtcgtagttagcggatctgatgaaatgtttagtgttcgtgtatactggtatggtggatctggtcctaggatgcgtggaatggatatatgtaggcgaattggaggatttattttgtgaattttgctgaaatgatagttctaaacactggatctgacctcgggatgctgttaaatgtggaaatcatggtcgatgctgtcatgaacatggtgttcttatggtagatctgagcaatgtatgtttcaaaattgtttgtcacatggaaatgctatggttctagatgcaatagaatgatacatgccgagatcccctctagttgatatgatagatcatgatgttttacagctatgtcatatgaatatgttcatttgttaccgatgtatttggatctacttaacatttccaaagcacgccgcgttctaattctagatctggtagtcatgtttgtacacgtcacccacctaatacaaatacatatgtctagtgtttggtgacactgcccgtcagatctgttttttccagatctgtggaacaaatactccacgcatgtatggtagttttgaaacgatcttgtatcttccattgttgtagtaacaactaaataaagtacaattgttcaattattgggaatcgtattttctgtagtgccgatgtacagcatattcatagatgtctatttaggaactcaaattttaaattgaggactagttatttattgtgggtcagtcttttgaattgtgttatcttgctgtactgaaataataatgtaccactaaggcgctaacatgtattttgtcctttcaggctgatggtcagatgcccagtgacaggactgttggtggaggtgatgatgctttcaacaccttcttcagtgagactggtgctgggaagcatgttccccgtgctgtatttgttgatcttgagcctactgtgattgatgaggtgaggactggttgctaccgccagctcttccaccctgagcagctcatcaatggcaaggaggatgcagctaacaactttgcccgtggtcactacaccagtgagttccattcttactaccacggtgctattttttttgttatgtggctaattacatgactaacttggggtgctaaatctttacagttggcaaggagattgttgatctgtgccttgaccgcatcaggaagcttgctgacaactgcactggtctccaaggtttccttgtgttcaacgctgttggaggtggaacgggctctggtcttggttcccttctcctggagcgcctttctgtggactatggcaagaagtccaagcttgggttcactgtgtacccatcccctcaggtctccacctctgtggttgagccatacaacagtgtcctctctacccactccctccttgagcacactgatgttgctgttctgcttgataatgaggccatctatgacatctgccgccgctcccttgacattgagcgcccaacctacaccaacctcaacaggcttgtgtctcaggtacagtcttgtatccttgcaatgatctcaaattctctgctatgttaattcactgccatttcttgtttgtgctgttctctaaccaacttgtttattgctaatgtgcaggttatctcatccctgaccgcctccctgaggtttgatggtgctctgaacgtggatgtcaatgagttccagaccaaccttgtgccctacccaaggatccacttcatgctttcgtcctacgctccagtgatctctgcggagaaggcctaccatgagcaactctctgttgccgagatcaccaacagtgccttcgagccatcctccatgatggccaagtgcgaccctcgccacggcaagtacatggcctgctgcctcatgtaccgcggcgatgtcgtgcccaaggacgtgaacgccgccgtcgccaccatcaagaccaagcgcaccatccagttcgtggactggtgcccgacggggttcaagtgcggcatcaactaccagccgcccagcgtcgtccccagcggcgacctcgccaaggtgcagagggccgtgtgcatgatctccaactccaccagcgtcgtggaggtgttctcccgcatcgaccacaagttcgacctcatgtactccaagcgcgccttcgtccactggtacgtgggtgagggcatggaggagggtgagttctctgaggcccgtgaggatctcgccgcgttggagaaggactacgaggaggttggcgctgagtccgacgagaatgaggatggcgatgatggtgacgagtactagaggagtcgtcgtcgtctgggggcttgatgttctgtgtgtcaaggcctgattgataactgctgctatcccatgatctgccagtgtggagttatcctgttgccgtgtgcgtgtgtcttcgagacatttgcttgtggtgatctgatgtttggggcttaatgggcttacaaccctcgttgttgtaacctgtgtgccctgttttatgtgagaccgcttcgtcacttataatatgcgcgtttgttcaattttatgtttg

SEQ ID NO: 186 - DNA, 1831 bp, Oryza sativa
  source 1..1831: mol_type = genomic DNA
accccaactgccccaaccctaacactccactaacgcctcccgacgccgccgccgcctcctcctcttgtttcgccaccgccgccgccgcctacgaggaagaagaaagaagaggaaggagaagatgagggagatcctccacatccagggtgggcaatgcgggaaccagatcggcgccaagttctgggaggtggtgtgcgcggagcacgggatcgacgccaccgggcgctacgacggcgactccgacctgcagctggagcgcgtcaacgtgtactacaatgaggcctcctgcgggcgcttcgtcccgcgcgccgtgctcatggacctggagccgggcaccatggactccgtccgctccggcccctacggccacatcttccgcccggacaacttcgtcttcggccagtccggcgccggcaacaactgggccaagggacactacaccgagggcgccgagctcatcgacgccgtcctcgacgtcgtacgaaaggaggccgagaactgcgactgcctccaaggtaactagtaccctaactatctcagatctgcctctcctcaaatcaaatctgagttcaaatgctgctgctgctgcagggttccaggtttgccactcgcttggcggcggcacggggtccggcatgggcacgctcctcatctccaagatccgggaggagtaccccgaccggatgatgctcaccttctccgtcttcccctcgcccaaggtctccgacaccgtggtggagccctacaacgccaccctctccgtccaccagctcgtcgagaacgccgacgagtgcatggtgctcgacaacgaggccctctacgacatctgcttccgcaccctcaagctcaccaccccaagcttcggcgacctcaaccacctcatctccgccaccatgagcggcgtcacctgctgcctccgcttccccggccagctcaactccgacctccgcaagctcgccgtcaacctcatccccttccctcgcctccacttcttcatggtcggcttcgccccgctcacctcccgcggctcgcagcagtaccgcgccctcaccgtcccggagctcacccagcagatgtgggacgccaagaacatgatgtgcgccgccgacccccgccacggccgctacctcaccgcctccgccatgttccgcggcaagatgtccaccaaggaggtggacgagcagatgctcaacgtccagaacaagaactcctcctacttcgtcgagtggatccccaacaatgtcaagtccaccgtctgcgacatcccccccaccggcctcaagatggcctccaccttcatcggcaactccacctccatccaggagatgttccgccgcgtcagcgagcagttcaccgccatgttccgcaggaaggccttcttgcactggtacacgggcgagggcatggacgagatggagttcaccgaggctgagagcaacatgaacgacctcgtctccgagtaccagcagtaccaggacgccaccgccgacgacgagggtgaatacgaggatgaggaagaagaggctgatctccaggactaattactactctactgcaatatcaatgtccaatctaatggggttcggttcacttcttgtgttgcttaggctatcttctcaagtgttgtcgttcttaattattactcctagctgctactctactctacttgatgtattattattactcagctttgattgatgataggcacaataccctgttgccttgtactcgtaggagtatgtgctgttactgtctaactgatctgtatgaattatcatcctatttttgttaatctatcttctagtaaaatgcagagttgctgcttagagta

SEQ ID NO: 187 - DNA, 2903 bp, Oryza sativa
  source 1..2903: mol_type = genomic DNA
ccacgcttcccaccccccaaatcctcctccctccctcccctaaacctcgccggaatccaacccctccgccgccgccatgagggagatcctgcacatccagggggggcaatgcgggaaccagatcggggccaagttctgggaggtgatctgcgacgagcacgggatcgaccacaccggcaagtactcgggcgactccgacctccagctcgagcggatcaacgtctactacaacgaggccagcggcggcaggttcgttccgcgcgccgtgctcatggacctcgagccgggcaccatggactcggtgcgctccggtcccttcggccagatcttccgccccgacaacttcgtcttcggccagtccggcgccggcaacaactgggccaaggggcactacaccgagggcgccgagctcatcgactccgtcctcgacgtcgtccgcaaggaggccgagaactgcgactgcctccaaggtattttgctagatctgctcgttttgtttggaatggtgggagattgggtgttgctttgctgcattccgcgtgtagatcttgtgttccatgcttgtcgtagcgcgaatggtgggggaatgctgcgattctagggttcttagctcgtagatctggccatttttttttactgaacatgtagatctgtgtgtttcactgcgcaatccattcgtggtgtagttggggaggagatgttccaactgctgagatgtggtgattagcacagtaggtgtggtggttgtcaacaaccttgttaagcctttcctcgtgtagtacttaagatgtggtagatccggcacaatttcatttatcattgtatgcttgattggttggtttgttgccttgcttagctgcaaatgtggaactctacattcccctgacttgtagtaaactgtaatttttcgcgagttgttgaaggcattttaattcgaactgacacttttacacttgcaagtgtaactgcaagctactaaaatggtagtagaatctaggggctgtaattcaagttttacctttgagcccagcttatcttaaggttgtttctggtgcaatactctgatatttgctagaatgatagatgcagttaggaaaataatgcagcatattgttgtttagttctactgaataggtatgctatgtggtttctgtcacattcacacatcagtagttcacttggtggtgccttaagtgaagcgcttatgattcacgctgatgtgttgcagtttgtgttcaacatcaactgaatattgggtaggaattaatgtatgtgctccatttgccacaggatttcaagtctgccactctctaggaggaggaactggttctggtatgggtaccctgctcatctcaaagatcagggaggagtacccggacaggatgatgttgacattctcagttttcccctcaccaaaggtttctgataccgtggtggaaccttacaatgccacactatctgtccatcagcttgttgagaatgccgatgagtgcatggtacttgacaatgaagctctatatgacatctgcttccgcactctgaagctcgccacacccacttgtaagtgaaaacatgccataattatggtactgtgctcagttatcgtactctgctctatgttgttattgatcattgatttcatcctggtacatcagagcagtttataatcagtcacctttatgtcagatgccactaccaatttactcttttgtgaagtacggagtataatgaattagctggtccatgttccccattgttgtgtgtttcatgcatcctggcactacttgattcaattaatgagtatgtctggaacttgcattcgaatacactgatactgaatatatagatgataagtctgtactacatgtatggggtctacagtgttgatatgaatatgggtttcttcatgctgttttacctaattctgactctgctttgtttctttccttttgcagttggtgatctgaaccatcttatttctgcaaccatgagtggtgttacatgctgcctgcgcttcccgggacagctgaactctgacctccgcaagctggcggttaacttgatccccttccctcgtctccatttcttcatggtcggctttgcaccgctgacctcgaggggatcccagcagtaccgcgccctcactgtcccggagctgacccagcagatgtgggacgccaagaacatgatgtgcgccgccgaccccaggcacggacgctacctcacggcgtcagccatgttccgcgggaagatgagcaccaaggaggtggacgagcagatgctcaacgtccagaacaagaactcgtcctacttcgtggagtggatcccgaataacgtgaagtcgagcgtgtgcgacatccctcccaacggcctgaagatggcgtccaccttcatcggcaactcgacgtcgatccaggagatgttccgccgcgtgagcgagcagttcacggccatgttcaggaggaaggccttcttgcactggtacaccggggaggggatggacgagatggagttcaccgaggccgagagcaacatgaacgacctggtggccgagtaccagcagtaccaggacgcgacagccgacgacgaggaagaggactacggcgacgaggaggaagacgaggttgctgcctaagccacctacctgcctgccattcctctcgctctcgtcatccatcgtagatgatgattgaggatgtgctcccttgtgttattattacctagtactgtattgcaactgtcgatctgggtcgtaagatgtttattttaggtgatttgatgctctagttactcttttttttccttgtgttgattaatggtgtgttgtcgatgcgaattgtgatactagctttaactgtggacttaaattactagatcctggaattgatactgtttgccagtaa

SEQ ID NO: 188 - DNA, 4684 bp, Oryza sativa
  source 1..4684: mol_type = genomic DNA
cccctcaatcctctccccattttccccgtcgctcacaaatctccgcttcgtcccccacccacccaccactccactccccgcagttggtggcccgcggcggcgcaagccctagcgtccacgcgaagcaaaccccccaaaaccctagctccgccgccgtcggcggcgcccgagctgcaacccccgccacgacgccatccgggtggctagcctaagcccctaaccaaaccctagcgaccggcgccgcagtcggggggagagatgccgcgggagatcatcacgatacaggtggggcaatgcgggaaccagatcgggatggagttctggaagcagctctgcctcgagcacggcatcggcaaggacggcctcctcgaggacttcgccacccaggttgccccccccccccccccccctgtctctgctcctccttccctccctcccccacgccgcgggaacactccggatcggcggtgtggttggtctgatccgtgtgggttacaagatttctccatgttccgcatcagaaatgggcgcgcttctctttttgtttaggtctaagggtttagtggagtgaagtgtgtgtgggttttgggcttgcagatgcttggagcgctatgtctagtgtttttttttacaagtaatttagtagtacacttgaacaccggcacgtttgaactggcaccagcattttgttggcattggggattgctcatttccaagtgtaagaatgaggcgtgattggggcatacttgcaacataggaatttcatgggaaacaattcatttccataggaactagagggaattcaactgttccgcgcaggtcctgttgtttaagagttcagtgtttcaacttttaaatgccttttgatactggaagcaggggaataaatagatcccagttaactgaattacgacttaaagtgccaaattcgatgaatggttcaatctcaatctgactccttgttgctctgagaagtgcagctacgatctaaatgcacagcctaaatacaatagcatccaaatattatgtttcttttcgtatcatctagaacggttacaatgtctatcattcatttcaatgcatattttcctttgttggtagctatgttaaccaaagagtgctaaagactcaagtttctctgcagggaggagataggaaggatgttttcttctaccaggctgatgaccagcattacataccgagggctcttcttgtggatctagagccgagagtgatcaacggaatacagaacagtgagtacaggaatctatacaatcatgagaatatatttgtggctgagcatggaggtggtgctgggaacaactgggctagtggatatcaccaggtatactttgatctgtcttatccatatttcatctgctacactgctaatcaattctgtaggtttgtcagccgatcaccaatgctataggttttgttatattctgtcattagatcaattgtgcctgtgtttcttcagtcagagtttaatatatctttcacattaatgttttttttcctatttacacactatagggtgagcaagttgttgatgatatcatggatatgatagacagagaagcagatggaagtgatagccttgagggttttgtgttatgccactcaattgctggtggaactggttcaggtcatttatctcgatctcctttcttggtttcattcatttgtcttagttttctgtaaatcaccatctattgtaactggagcgtatattggtgttttaacatgtggcttagtgtgtatatgggatgctgtagttgcaatatggaaaagtagtatttccacatgtcagttttcttacaatagttatctaattttgttcactcttccctcatttaggtatgggttcttacctgttggagactctgaatgaccgatacagcaaaaagcttgtccagacatacagtgttttcccaaatcagatggaaacaagtgatgttgttgtccagccatataattcgcttttaactctgaagcggctgacactgaatgctgactgtgtggttgttcttgacaatacggcccttaataggattgctgtggaacgtcttcatttagcaaatcctacttttgcacaaacaaactctttggtctcaacagttatgtctgcaagcacaactactctgaggtatcctggatatatgaacaatgacctggttggccttcttgcctctttgatccctactccaaggtgtcattttctgatgacaggttacactccattgactgttgaacgacaggtgatttgatcatatttgttgcattggttcatgtaacatttgatttcacattttatctgtttagtaactacttttcttgagtttagtttgggggttggtagactagtatatactatgtcaaatacatattactttccctgccttcttttgtgacaaatggggaaaaattcagttcatgatataatgatatgctcaattgcaggttaacatgatacgcaagacaacagtattagatgttatgaggcgacttctgcaggtattctttgcttccttaggaataggatgcttgccactttatgatctttatgaaatttaaattttggacctttatttgttgtcttgcagaccaaaaatataatggtgtcatcatatgctcgaaataaggaagctagtcaggctaaatacatctccatacttaacatcattcagggagaggtggatcctacacaggtaaagttctgttaaatgggtttattagtttagctttatccatagcagctggaatattgaaatgaaatttgcctagttctgaagcagaatgaagatctcgttcttctgatcctttggaattgcttgttcattccattcttatcttttggtattctcatgcatttaggtccatgagagcctacaaaggatacgtgaaaggaagcttgttaacttcattgagtggggacctgcaagcattcaggtcattatacaactagaataattttaggttaaacctttttgacatattgatttattgttatttcaactgccacaggttgccttatcaagaaaatctccatatgtacaaaccacgcatagggtacctttctctcactctctcactatctttttttttgtcaattcaagtgcaatgtttgaatcactaatgtttgtctacaggttagtggattgatgctggcgaatcatactagtatccgtcacttattcagcaaatgcctgggacagtatgaaaagctaaggaaaaagcaagcttttcttgacaactacagaaagttcccaatgtttgaggtaagaaactctattccttcaatttcatccattttcattacctgagtaatttccaaatttgaagtttctggttaaactaggtatgtttgaagtgctacaatgtaattccctgttcaaaacctgtttgacaccaacaattttgaacattccactagcaattttacattaaagtataaaacaaacatgaactgtagcactataagtttcttgtttttcttgaagtgaaatgctttcagtactatatatgatcttgtgaggaaacctgtccattattctgtccaaaatactcaacgttttggcctctctatacaggacaatgatctctctgaatttgatgaatctcgagaaataatagagagcttagttgatgagtacaaggcttgcgaatcaccagactacatcaaatgggggatggaggtacgtctttgctccatttcagtatatttgttatttactttatgtgaaatgctgagcaatctgttggaaaataggatgctggagaggcaaacgttgcggccgcacttgattcgaagttagtggtgtaaatatgaaggtaacgcattggactccattcctgatatagcttgctgtacgggtacctggaacctttgttgaactttttggagaaatattttgtacatggccttgatgagcacattattctcctaaagaagtgcatttattttatcagcagtccttgtgttgtggagagttggagatattatggtgttaaattaggtgtatcgacagtgacactactaaattcgttactcctttgattttcactctgttagctactcccccgtcccaatatagttgtccttttatgttgtttagcatagattaagtttaagaataaaagacagtaatgtcccttattaaatgatgtatgcttgtgagtagaattttgaaacctggaatttaggacgaaggggttataatattgtcttttaaacctcttgtcatgagctatgacttgtacatgcaggtcctacaagaatgcaactctaattgcctgatggtcatcagttcgatggcagctgctcgactcgttcccactctagtgctagatgcgtttcctcagcattcttcaagtttgcttctcgtgttagtgttacagcctgtgcgacatgagtgtatatcttgacccacttcgaactggccgtagtttgtgctgttccgttttgggttgcaatcccttctgggatgctttgtatgtgtggatgcgtgtgatgtactgatactgatgggttttgtgccagaatagcatgcagagctctaattgttggtgcagacaaatggtttgacagatctggctgattactgtaatgtactagagtgtaaaaacagctcgcgtctttggctgcgcctatggttttgcatccagccagccagtttgttca

SEQ ID NO: 189 - DNA, 3644 bp, Oryza sativa
  source 1..3644: mol_type = genomic DNA
tgggccgtccgatctggcgatccggtgccctaggccccgcgcccactataaaggtcgcctcctttctaaagccgcaccctcgtgttcccccatttgcacacccaccccccccttcactcctctcctcttcggccgctgccccgctactcgcttctccgaggtaattacgacgggattttgctatcgttttggttgccggacctgggattgtgtggggttttggatctggttcgtggttttgcggtggatttggttggggtcgtggtggatttgagggattttttgttttgaggtttcgtttgctcgttctgtgagtattctttttgggcgaggttgcggatttgtgaggtgtttttaggttctcacagcaggagttcgggctttctttatgttagatctgtttttttggtagatttttagttgttttgcagtccactcggcttatttcggaaggttttatctgtgacattttgggatttgcttctcggatttgctctcatcgaacgtgctttcactgagaacatatactagattcgtttcggttcccgttttgctgcctttttgttcaaattttgagcttggatctgtgtcctgttttgaactttttgctctcaaaataccgggggatttgagcttttcaaaagcagatctggtcctccttccatttcaaaccaatcccccatcgttttctcgcacctaaccgcggaatctccttcgatttgcctccctcccacccgcaggcaccaaccggcagccatgagggagatcctgcacatccagggcgggcagtgtggcaaccagatcggctccaagttctgggaggtggtctgcgacgagcacggcatcgaccccaccggccgctacgtcggcacctccgacctccagctcgagcgcgtcaacgtctactacaatgaggcctcctgcggccgcttcgtgccccgcgccgtgctcatggacctcgagccgggtaccatggacagcgtccgcaccggcccctatggccagatcttccgccccgacaacttcgtcttcggccagtccggcgccggcaacaactgggccaaggggcactacaccgagggcgcggagctcatcgactctgtgctcgatgtcgtcaggaaggaggctgagaactgcgactgcctccaaggtcgattccttgctccactgttaaaatgttgcttgttaattatgttcgcgtgattcccgtgatgcgtgttagttcagatctgggtgaaaatagttccagatttggtagtgtcggctgcttttttttcttttcttttataagcatataatttatcatgtgatgctttagctttttagtagagtattttatttcctgtagtagctttttgttagctagtacgtgtcaccctgatataatggaactttaataatctataatgtagattccaaagtgctaattatttagtctttgctaaacttgttgtgcggtattattgaccattgtgatttacccaccttgtgctgtttacagcgagtgaggtctttactcttggtttagtgtttggtttctaataagactacttgttgctccagtgtaattttgttgtcatgtaacataagtgcggatagttttaagctggcaaacttgattgttgtggttacagttttttatgtttaaagctctgttcaaatgatttagcctgggattgttttattgttgtcagtctcttattaagctgtaaatcttattgctagcttgttattctgaaatatggagtagtttttaatccttgccataaaaccctaccatgaaatctatttcagcaatcctatggctattatgttagctagcactgcatcaccttatatatgttttgtcttttctgtaatcaggtttccaagtttgccattcccttggaggaggcactggatctggaatgggcacactcctgatctccaagatcagagaggagtaccctgaccggatgatgctcacattttctgtcttcccttcaccaaaggtctcagacacagttgttgagccttacaatgcaactctctctgtccatcagttggtggagaatgctgatgagtgcatggttcttgacaatgaggcactttatgacatctgcttccgcaccctcaagctgaccactcctagctgtaagttaattcttactctggttctaactagtggcatatgctgttcagattttcagagatgtatttggtagcttagtttcattccaatgtcaatgcttgctttggtagatccatgtatcttgtgtggatcttgctatccattatttgcagtccaatttgcatggtcccaagcccagcatgatctaccttgccttgtttaattatgaggccagttacatctgaatccccttgctggttcggtggtttaatttatttgcacccatcgtacagatcaagcatgtttcctgtacacattattgcatcataattcagtagctggcatgatagtgccacctactcctacataagggcatcaacttttcttaggaatgttgttgagtgcatcatgtactactatctttatttaaccataattatttttgattcatgttaaaaacttgcatctagtttctgtctgtactacagtctctgcctgtaaagttgctatagtgtttttatcctagtttggctaacctaaatttttcatatgaacagttggcgacctgaaccacttgatcagtgctacaatgagtggagttacttgctgccttcgcttccctggtcaattgaactctgacctccgcaagctggccgtgaacttgatccctttccctcgcctgcacttcttcatggtgggctttgcgccactcacctcgcgtggctcgcagcagtatcgcgccctcactgtccctgagctcacccagcaaatgtgggacgccaagaacatgatgtgtgccgctgacccgcgccatggccgctacctcacggcctccgccatgttccgtggcaagatgagcaccaaggaggtggacgagcagatgatcaacgtccagaacaagaactcgtcctacttcgtcgagtggatccccaacaacgtgaagtccagcgtgtgcgacatcccgccgcgcggcctctccatggcgtccaccttcatcggcaactccacctccatccaggagatgttccgccgcgtgagcgagcagttcaccgccatgttcaggaggaaggccttcttgcattggtacaccggcgagggcatggacgagatggagttcaccgaggccgagagcaacatgaacgaccttgtctccgagtaccagcagtaccaggatgccaccgccgacgaggagggcgactacgaggacgaagaggagcaggtccccgaagacgagtaatctcgccggagtttctcctgggatcccatcttgagtgtcgcctgttgtgtcctaccgtttgggcaatctttattattgtttcggtatgatgatgcttaattggttatgtgcttttgggtaatgtagtagtagtacaatgctgtgtggtccgtagcgccgctgatgctactgccactttaatccgtttcacctaccagaccatgtttggattcgtatgctatcgcatatgtttggggagtgtattggattcttgtactggttttgattgctcccgttgctgtctcttgtcttgctgca

SEQ ID NO: 190 - DNA, 3779 bp, Oryza sativa
  source 1..3779: mol_type = genomic DNA
gtcactttccctgcaacgtgttcccggggctgaagtgttccggttcacgccattgtgcctgccctccttttatccctagctttttctatgtgctgcactgctcaggtcccttctgtcttcctctgaaccctgaaccaatcccgaactctgaactctgaaggctgcagagacaggcagagagatatgagggagataataagcatccacatagggcaggcgggcatccaggtggggaattcttgctgggaactatactgcctcgagcatggcatccagccggacggcctcatgcccaggttcttctcgatcccaattcttgctcgtctgcatctcttgctgtcttttcctacttaattttgtgaaattctgatattcggatgatggttttgtcctgtttggttggttcttgctgtagcctaaaaaagaattgatcttgaggagaattttggggcagagtctccagctccagtcatgtatgacaatcagaagtgaaattagcgatttttattcgatgtttgatttgcaccatgcatgctagcactgttcttgtagagatgctatctgtgaatctgtgatccccaagccggttgctttgagagtagaaagcctgtgccttttttgtgaagcgaatttcatttcaagaagaatactagtctgtgacttgctgcggtgcctagtggctcctagtttacgatatcctaatccttggtcatatctgacgcttgcttgcagcgacacaactcctggaattgcaagggatgcattcaacacgttcttcagcgagacgagttcaggcaagcacgtcccaagggcgttgttcgtcgacctggagcccacggtgattgatgaggtgaagaccgggccataccgccagctcttccacccagagcagctcatctcctacaaggaagacgctgctaacaactttgctcgtgggcactacacaggtgtgatgcttaccctgaaactgagccattttgcagaaataaaatgtgtctatgaaaatgtctaaaccaacatattgatatactccaactagaatagtattcacaagaaacattctacaggtatgattgatccacaaagatatggtttgggtggatttagaggagtctgaatccatgatattgcttacatatccttgggatccataaggattattgctcacataaggaataacattaattgtttataacttatatccttggggtgacttgtaataataatttaggaacttacgacatgccgactattttttagtgaaaaatatgacgccataaatttagcttcctccataaataaattgtcatactagagaaactgtcatattcctttataatgaaaatatttttttagtaatgattcaaatccttttttttttctgctgcagttggaagagaggtggtagatctttgccttgatcgactaagaaaactggcagataactgcactggtctccaaggttttctggttttcaatgctgttggtggaggaaccggctctggacttggttcattacttttggagcgcctatcagtagattacggtaggaagtcgaagctcgggttcacaatatatccttcaccacaggtaatcaagaaaagtattcatgatttgttaccatgtttgtgttcattacagcgtattgtagtgccatggaaaaaaatagaatactccagcaaaagaatgtcttctgtgatgttgaatcatttatttgacaagtgcatggataaaattctcagggaaaaccgaagtaaattatgttcatcagcaaatgcaatttcttataaaactgattctcccatgatcctaaacacatgtccaattttcagcatatttttcattccatcattatctcttttttttcgaaaggccattccataagtatctgaaaatgaccacagtaactactgtaaacatctgattcttatgattaaaaaaaatctacatatgtctgccggaccctattttgaatagaaagacccttccaaacaatctaatctttatggaagacttaatctaaaaaaatctttatggaagagctgtgcaaaattacgtaatcaccaactgttcatatgtccttatccaaaggcgtagaatgtaggcaggtgtaccttcacactttttgtgggagcaacatcaacctgttattgatggaaacaactgtttttctttttatactacttcctccgttttacaatgtaagtcattctagcatttcccacattcatattgatgttaatgaatctagatatctatctagattcattaacatcaatatgaatgtgggaaatgctagaatgacttacattgtgaaacggagggagtatgaactatttccttgataatttttacagaggtcagtataggtctataagagtcagatataggacaatacatcatctacataatcgagagcgagtgaaaaaaaaagttatttttagttttcttttttcagaaggctgtgaaccatactttaatttaactatgtaagactattaataatcgtactagtatttttttatgtcatcatcatgcatgcacatcatgtcagatactcagatatctcaatgcaaggtaaacatgtaccctccgaatggactagagaagctaaatttgtcgatgttaacatacaagctctgtactgaaaaccactccctgtgtgttgcagatctcaacggccgtggtggagccttacaacagcgtgctctcgacccactccctgatcgagcacaccgacgtcgtcgtcctcctggacaacgaggccatctacgacatctgcaagaggtcgctggacatcgagcggccgacgtacaccaacctgaacaggctcatctcccaggtgatctcgtcgctgaccacgtcgctgcggttcgacggcgccatcaacgtcgacatcaccgagttccagaccaacctggtgccgtacccgaggatccacttcatgctgtcctcctacgcccccatcatctccgtcgagaaggcgttccacgagcagcactccgtcccggagatcaccaactccgtcttcgagcccgccagcgtcatggccaagtgcgaccccaggcacggcaagtacatggcctgctgcctgatgtaccgcggcgacgtcgtccccaaggacgtcaacgccgccgtccactccatcaagaccaggaggactgtgcagttcgtcgactggtacgttaactccatcatctcgctgaattccagagattttagccggagatgatgacgatgatgatgacgaagacggtgatcttgtgtttcaggtgtccgacagggttcaagtgcgggataaactaccagccgccgacggcggtgccgggaggggacctggcgaaggtgaggagggcggtgtgcatgatcagcaacaacacggcggtggcggaggtgttctcgcggatcgaccgcaagttcgacctcatgtacgccaagcgcgcgttcgtgcactggtacgtgggcgaagggatggaggaaggggagttctccgaggccagggaggacctcgccgcgctggagaaggactacgaggaggtcggcgccgaagtcgaggacgacgacgaggaacagggcgagtactgatcgggctagcctgctaggtgaatctagcacggtagataaaccgcaagtttgtaaggtcggtggaagggggtctctcggtttacatggactcttgtgactttgtggtgtgagagtgggttttgttgtacttgcatcacaaaaaataaaagaattcgtcagaaatcaaaatgtgaatcaaaagcaaatcacagtga

SEQ ID NO: 191 - DNA, 3424 bp, Oryza sativa
  source 1..3424: mol_type = genomic DNA
gaagagagagagaaagagagagagagagaggccgcttctctagtctagaccaaaggaaggaaaccaaccgagaggcgaggcgaggagaggagaggagaggagaggaggaggaggagggaggagaagatgagagagatcatcagcatccacatcggccaggccgggatccaggtcggcaacgcgtgctgggagctctactgcctcgagcacggcatcgagcccgatggcaccatgcccaggtgacgatgaatcccccctccccctcccccaacctcttcttctttgatccgtagatgcattcctgttcctgatctcgggaggcggccccgcgttccccggcttcgtttgatctggtagccccggttgagttgcgtccgaaatgccagatttgtttcgccgtctgtttttttttgtgtgtatgtgttttttttggggggaaattgtttgcttcggcggagcgaacgatgggtgcagccttccgcttgtacttctcgtttggactctgcggattggttttggccgaaccttcttggtggttggtgcatctccttgccggttggtgaggggattgcaagggacaggacgaacaccgtgcgtctcggaggaagggaattttagccgtagtttttacgctcttttttttaccgtttggaattatatggaggaatgcgtttgattttctccggagtagactgtagatttgcgtgctggttgcatgtttacaagttggcaattgggagtttccagagttctttacggttctagatctgcgaatttacttgtggggtgatgcttagtaaataatgtcacatggaagctctgagtgtcagactgagcacgtagatcgtcctagattggagagtttaatctgggttactattaaaagcggcatcctccactatcgaggaggatttgttttgttggttttactttgcttggtgtaagaattgagtagattattgaatcataaacaattgtgctcatgctgccttgcctgagaattagattccattatattatcatggatgtagcccgctttttgtaggcagctctggtagactgtaatttatttggtactgcataggctaatgattagaattatcagtcagttttgatttctaaacattgtgctgtttgctcttggtgcagtgatacaacggttggcgtcgcacacgatgcgttcaacactttcttcagcgagacgggcgctggcaagcatgtgcccagggccatctttgtcgacctggagcccactgtcatcgacgaggtgcgcactgggtcgtaccgtcagctcttccaccctgagcagctcatctctgggaaggaggatgccgctaacaactttgcccgtggccattacactggtaattcagcttagagttcatacaagtgttattctattgcaactgtgcatgtgtcttgttctcattgtttgtggaatgcagttggaaaggagatcgtagatctatgcctggaccgtgtgcgcaagttggcagacaactgcactgggctgcagggattcttggtgttcaatgctgttggtggtggaactggatcaggacttggttctcttctgttggagcgtctctctgttgattatggaaagaagtccaagcttggcttcacaatttacccttccccccaggtataacttaatctgatccatgttagttgtactctgagggaaaaaattaaataaaatgctctataccagaaacttgaaattttcaggctggtgtagaattaatttatttggacacctgcttagatatgggccatgttatcagccacttctttttcttgttgttgtgagttgtgcatggcaatatattgattattggatctgccaaccattctctaattagtatgtggactaataaactgctggcctggctgcctggctggtggggatctacctatatggctatacaatatccctatcttatgtagactctttagtgaacttttatggactattagtcttcttcgcgaagtctgtaataccatgcattgtatgagccagcattatcctagtgtactgtaccaactttccatgtgatgtgggcctttcagcttgttcatgtgatgagtgggtttgctttgtcttagctgttgtggggacaatttgggtagagttgttgtacaattatttaaagttcatcatatcattatcttctcgtcttatgccactctggtttgcaggtctcaacagctgttgtagaaccatacaacagtgtcctctccacccactccttgcttgagcacactgatgtggcagttctcctagacaatgaggctatctatgacatatgccggagatcccttgacatcgagaggccaacctacaccaacttgaacaggctcatctcacagatcatatcttcactcaccacctctctgaggtttgatggcgctatcaatgtggatgtcactgagttccagaccaaccttgtcccataccctcgcatccatttcatgctttcatcctatgcccctgttatctctgctgagaaggcttaccatgagcagctttctgtgcctgaaatcaccaatgctgtttttgagccctcaagcatgatggctaagtgtgaccctaggcacgggaaatacatggcttgctgcttgatgtaccgtggtgatgttgttcccaaggacgtcaatgccgcagttgcaaccatcaagacgaagagaactgtccagtttgttgactggtaagctgtcttcatcactattttagttgcgcttattttaatcacaggcaacctatccacttgtttatcaacacctgattggctaaccaactgtttattgcttctcttcctccacaaaggtgccctactggattcaagtgtggcatcaactaccagccaccctctgttgtccctggtggtgacctggctaaggttcagcgtgcagtgtgcatgatcagcaacaacactgctgttgctgaggttttctcgcgcatcgaccacaagttcgacttgatgtatgctaagcgtgcgtttgtgcactggtacgttggtgagggaatggaagaaggtgaattctcagaagcccgtgaggacttggctgcccttgagaaggactatgaggaagtcggcgccgagggtgcagacgacgagaacgacgatggagaagactattagtagctggttaataagtagttctctggttaatgattggtttgtcagtatactccggttccgttgcattgcatattcctgttatgtgtgtttactttttgtactgtgctaaactgttgttagcccctcgttggccatgattgttcatatcttcccattttgctgtgcattgcttgctactcccccccaagcttggtacatatgccattctgagctgaattgcaaaactgtatgctctctatgcatggtccaatggagctatggatgctttcttctattaa

SEQ ID NO: 192 - DNA, 2508 bp, Oryza sativa
  source 1..2508: mol_type = genomic DNA
tctccacttctctctctctcccctctccgccatctccaacgccgcctcctcctcctcctcctcaaccccacccacctcgccgccgccgccgtcgccgccgccgccgccgccatgagggagatcctgcacatccaggggggccaatgcgggaaccagatcggggccaagttctgggaggtgatctgcgacgagcacgggatcgaccacaccggcaagtactccggcgactccgacctccagctcgagcggatcaacgtctactacaacgaggccagcggcggccgctacgtgccccgcgccgtgctcatggacctcgagcccggcaccatggactccgtccgctccggcccctatggccagatcttccgccccgacaacttcgtcttcggccagtccggcgccggcaacaactgggccaagggccactacaccgagggcgccgagctcatcgactccgtcctcgacgtcgtccgcaaggaggccgagaactgcgactgcctccaaggtaaaccctaaatcaccagatctgcgcgtttccccgccttctcctctcgctcgatttagccatagccttgtagatctaggggatttgggtcgtagatctgaagaaattcgggccagatctggagattcatgagggagtttgaaggattaggcgactaataatttctggttctccgagtgattcaatgtaggtttccatttcaacttgtttgagtgatgatctcactctcgctcgcctcgctgcagggttccaggtttgccactcgctgggaggaggaactggctccgggatgggaaccctgctcatctccaagatcagggaggagtaccctgaccggatgatgctcacgttctcggtcttcccatcgcccaaggtgtccgacactgtcgtcgagccctacaatgctaccctctctgtgcaccagcttgttgagaatgcggatgagtgcatggttcttgacaatgaggctctctacgacatctgcttccgcacgctcaagctcgcgacacctacttgtaagtacaaagaagtctctgcaagtctgcagtgatgtttgtgtgtttcatttgtggatgatcattcagtgattcggtagaatttagcatagttttgtgtatactgtttccctggtgtggcacatgctaaacatcatgctgttatttgattatggctagcaattctgtaatcctccatgagtgttactagctgtttatatgttatcactctatatactcttcagtcttcatttctgtgatatgctctccacattctgatgtgagtttacctaattctactgttacccgtcacagtttagaagggtaaatgcaccaatggtttcatacatattgctaactttggatcatcagaagttcattttgatacttgttatcctactaaacatctgtgtgtaccatgtattttgtataattagtatagcatgatagaagaaaaaaatgacttttcaatttatggtaatcttctgggagcatatatttgttaaagctaggtcttgtctagtttatatgagattgtgccttgtggttcttaatgatttttactttgttttttcagtcggtgatctcaaccatcttatctctgcaacaatgagtggtgttacctgctgcctccgcttccctggccagttgaactctgacctccggaagcttgctgtcaacctgatccctttcccgcggctccacttcttcatggttggattcgctcctctgacttccaggggatcccagcagtaccgtgccctcactgtaccagagctgacccagcagatgtgggatgcaaagaacatgatgtgtgctgctgacccccgccatgggcgctacctcacagcctcagccatgttccgcggaaagatgagcaccaaggaagttgatgagcagatgctgaatgtccagaacaagaactcgtcatactttgtggagtggatccctaacaatgtcaagtcgagtgtgtgtgacattccacccattggcctgaagatggcatccacattcatcggcaactcgacctcaatccaggagatgttccgccgtgtcagtgagcagttcaccgccatgttcaggaggaaggctttcttgcactggtacactggtgagggaatggacgagatggagttcaccgaggctgagagcaacatgaacgacctggtagctgaataccagcagtaccaggatgccaccgctgaggaagaggactatgaggaggaagaggaggacgaggaggttgctgcctaagccacctctctgcatgtttgagctatatagatatcccttgtgacatttgctactactagttaccatcgttgattgggggtgcttgttagatgctaggttaatgttattatttccaaatactatgttgccttgtcggactatttttatctgggttaatggtatgttcaacattattgtcttgaggtggattaactgttggaagtatgtagcaaagcttgaggtggaatgcatatgaaactgaactttagctttgca

SEQ ID NO: 193 - DNA, 3048 bp, Oryza sativa
  source 1..3048: mol_type = genomic DNA
aaaccatttcgaattctcacccaagcaagcaaccccgtctcctccgcttcgctactctcctcgtcgtctccggctccggctccggtttccggcgagcggcggcgcgatcccgggcggcgaaggagggggaagccatgagggagatcctccacatccagggcgggcagtgcgggaaccagatcggggccaagttctgggaggtgatctgcgacgagcatggcgtggacgcgacggggcggtacgcgggggactccgacctgcagctggagcggatcaacgtctactacaacgaggcgagcggcgggaggtacgtgccccgcgccgtgctcatggacctcgagcccgggaccatggactccgtgcgctccggccccttcggccagatcttccgccccgacaacttcgtcttcgggcagtccggcgccggaaacaactgggccaaggggcactacaccgagggcgccgagctcatcgactccgtcctcgacgtcgtccgcaaggaggccgagaactgcgactgcttacaaggtatctcatctcatctcgcatgtcccattccgcgtggtttagctagatccgagagaggctttgcaccatcgagttagatctagtacggatctgagcttgtagcgggtggaagcgcgattaacgtctttttttgaaaccatggagtgcgattaacatcggtgccagtttcgcatttaagggagaagcggttttagcatttagacattccccaattcgtagtcctgttaattgtagtggtgtatgtatcgaattgaactgtccattgctgttgatcttctctataagtatgtcttcgtgttatttgttgtatagcatgataatctgtcatctgtgctacttgtgttctaaattctaatggcccaatttgcatttagcttataatgccattgtgtgaccaatttttcatatcttggtagggatgtgcctgtgagaattttaagctccataagacgctctatcaatcatcaacctatgttttgtatatgagctcctattgtcttatgtagcttgatcaacatcaattgttgttgccttgttggtggaatgggcatcaacatcaacaccaatatcttatctagctcctactgtagctgttctagatgtttacacagaacttttctctttacctgtagtgtccacctgtgtcatagctggatttaattctttaaaaactcaaaacatagcaaaattgtaaccttgtctttcatggtttacaatgaaatcaaaactttattgctttggtcatccttatgattatttatttttggtacagctgtacaggtataatattcaacatgatagacccaagtaatatgccttagttgaatgccatgacaagttcatcgactaataaagcttggtagaagaagatgtgaaaaattgcctttgccttaatccatataataccttctctattggaacatgatcaattgctcccaaactctggtttcgtggaagacacagtgataccctaaacttctagctgcccttggccttttgaatgttgctacattcgttgaacccaaggctgccttttgtagatgcatgtttgaagtctgtttgcattgatgactaacatcatggtcttatattctttacttgcaggattccaagtttgccattcattgggaggaggcactggatctggcatgggaacccttcttatttctaagattagggaggagtacccggatagaatgatgttgacattttccgtcttcccatcaccaaaggtctcggatactgttgtggagccttacaatgctaccctttctgttcaccaacttgttgagaatgctgatgaatgtatggtgcttgacaatgaagctctctacgacatatgcttccgcacactaaagcttgctacccctacctgtaagttagtctcctcttgtttacttctccatgatatcactaaattactgttcaactagaagtaggcactcatagcttgcttggttctaacaatgcagttggtgacctcaatcatcttatctctgcaaccatgagtggtgttacatgctgcttgaggttccctggtcagctcaactctgatctgcgcaaacttgctgtgaatctcatccctttcccccgtctccacttcttcatggttggctttgcgccattgacttcacgcggatcacagcagtaccgtgctctcaccgttcctgagctgacacagcaaatgtgggatgcgaagaacatgatgtgcgctgctgatccccgccatggccgctacctcacagcttctgccatgttccgtgggaagatgagcaccaaggaggtggacgagcagatgctcaatgttcagaacaagaactcctcatactttgtcgagtggattcccaacaacgtcaaatccagtgtctgtgacattccgcccagggggctgaagatggcggcgaccttcgtcgggaactccacctccatccaagagatgttccgccgggtcagcgagcagttcactgccatgttcaggaggaaggctttcttgcactggtacacaggcgagggaatggacgagatggagttcaccgaggcagagagcaacatgaacgatctcgtcgcggagtaccagcagtaccaggacgccacagccgatgaagagtacgaagacgaagaggaagaagctgaggccgaatagcattgagccccatttgcccttcacaggttgttttgccagtgaagagttttgtgtctttgtgatgctgtgctcttttttctttctctgacgtgcgtgatggatgtatgggtgaggtttgcgtccgtgcttcgttttgtcacctgtgctgcgtagcaggctgcagtcccgttttgtaagacgtctctggtggtcagtagctgaaggcttgaaaagtgttttgagtgccctccttgagctaaatcacctgtaagttctgacatgtattggtagtggttttctcatctctgtgaagcttctgtgtagtctgttactatatccagtttctctgtatatcgatcgtagtgtcatcttgcttggctgaaacgttttaaagatca

SEQ ID NO: 194 - DNA, 3335 bp, Oryza sativa
  source 1..3335: mol_type = genomic DNA
gtagccctagccccacgctccgctataaaaaaaccgcccccatttcgacggtctccaagaacacacacactctcccatcccaacctctcccaaaattagccccgatccgatcgcttcctagccctgattcgaggtgaattccgcaacaaaaaatctttcgattcgcttccccccgaattatctagcgcctcgtgctttccggtgaatttttttttgggtccgatcgattctttttttttttttttggggggggggggggttgggtggattattgaggatttgaggtgttcttggtgcgatcggaacatttttggttcgtttgtttggggattcttgcggtgttctgggtagaatcaggactagctgttcttctcggtgttccgatcgtttggggattagtgaggatttgaggtgttcttggtgcgatcagaagatttttggttcgtttttttttctctttcggattcttgcggtgttcttggtagaatcagtactctcggtgttccgattcccgcgttggaatttcagaaggtctcacccaccctgacgtttcgcgtttcgtggcgatttctctgcaggtaaaaaaggggaggagaagatgagggagatcttgcacatccagggcgggcagtgcgggaaccagatcgggtccaagttctgggaggtggtgtgcgacgagcatggcatcgacccgacggggaggtacgccggcacgtcggacctgcagctggagcgcgtgaacgtctactacaacgaggcgtcgtgcggccggttcgtgccgcgcgccgtgctcatggacctggagccgggcaccatggactccgtccgcacggggccctacggccagatcttccgtcccgacaacttcgtcttcggccagtccggcgccggcaacaactgggccaagggccactacaccgagggcgccgagctcatcgactccgtcctcgacgtcgtccgcaaggaggccgagaattgcgactgcctccaaggtatcatcatcatcataccatcacccccactatctgtttcgtttcttgaattcttttccatggaatccggtggtcgatcgagctctgcttccggtggtcaggtttccaggtgtgccactcgctgggcggcggcacgggctccggcatgggcaccctgctgatctccaagatcagggaggagtacccggacaggatgatgctcaccttctccgtgttcccgtcgcccaaggtgtcggacaccgtggtggagccctacaacgccacgctctcggtccaccagctcgtggagaacgccgacgagtgcatggtgctcgacaacgaggcgctctatgacatctgcttccgcaccctcaagctgacgactcccagctgtgagcatatccctgccattgatacctgttcttttgttatactactaagttttactgaattagattatcatttctgcaatattatgagaaatttcagttcactaagtcatcttgaagtgctttgtgctttatgaaaaaggtcgttgtatgtcattttcgtttcactagtgcgaaactactgcttcacatatccaaaatgttgtgaggagcttaatcatcttaattaggtgatgccagctgacttagtttggttccttgtaaaggattattagtgttggattcgtttataccattatatgtagttggtgtgcttgacttgtttatccaaccaaccaccagtttaaatgagctgactgaactaaatctcatcaaatctcttaggccgagtttagttccaaactttttcttcaaacttccaacttttccatcacatcaaaactttcatacacacaaacttccaacttttccgttacatcgttccaatttcaaccaaacttccaattttggtgtgaactaaacatacccttagtacataagttttgccttgtagttgaaataataactgcacttattccacatactgtgttacataaagggagtatgaactgttaaatgttactagaaggtctgatgctgggtatgacttgagggttgttttctgcaccattttccatatcgctaatacttctgtagcttggagttggggcatgttttccagcataagaatgatatccccttaattagaaatgtgtggtaatgaaaattcttgtagtgtcaactgaaaccaaaacatcagttcagttctgaacttctaaattctaaaagcaaacatgctactactttatttaatttgttttttctgctgatgtattcttttggtgatcttttatctagtaacatttgttatgattaaaagccaagctgatatgtttacttattaggctcttgctgtgctactgctcatctgaatcttgatttttgcggacagttggtgatctgaaccacttgattagtgccaccatgagcggtgtcacctgctgcctgcgcttcccagggcagctgaactccgacctccgcaagctcgccgtcaacctgatccccttcccgcggctccacttcttcatggtgggcttcgcgccgctcacctcacgcggctcgcagcagtaccgcgccctcactgtccctgagctcacccagcagatgtgggacgccaagaacatgatgtgcgccgccgacccgcgccacggccgctacctgacggcctcggccatgttccgcggcaagatgagcaccaaggaggtggacgagcagatgatcaacgtgcagaacaagaactcgtcctacttcgtggagtggatccccaacaacgtcaagtcgagcgtgtgtgacatcccgccgcgcggcctctccatggcgtctacgttcgtcggcaactccacctccatccaggagatgttccgccgcgtcagcgagcagttcacggccatgttcaggaggaaggcgttcttgcactggtacacgggcgagggcatggacgagatggagttcaccgaggcggagagcaacatgaacgacctcgtctccgagtaccagcagtatcaggacgccaccgccgacgaggccgagtacgaggaagaagaggacgcgatacaggagtagagactgtctgggcaatggtacctcgtatcccctgcccatcgttaccctaatatgtttgcctgaacatcatcgcagttgcatcaccatagctacctccgcaccttaaaatttgatgcttgtttgtatgctatcgcgtgtatcaggagtgcgtactggttccgtatgctaaagtcttggctattgatgttctgtttgcttgcttacaagttactgtgctgagcgaaccattgcaactccgattgaaagagtgatgggatttttttttttggactggaagatttttataggatttcgttcagttcctttgagaatc

SEQ ID NO: 195 - DNA, 4012 bp, Oryza sativa
  source 1..4012: mol_type = genomic DNA
cgggatataagcgcccacgatccctcctcctctccttcccacgttctccaccctctctccatcgatcgatcgcaaaccacctcccaagaacaaccaagaaagagatcggatcaccgatcggcgcgcggcgagcgatcgatcgaggtgcaagcgatcgaagatgagggagatcctgcacatccagggcgggcagtgcggcaaccagatcggcgccaagttctgggaggtgatctgcggcgagcacggcgtcgaccccacggggacgtacaccggcacgtcgccgcagcagctcgagcggatcaacgtctacttcaacgaggcgagcggcggccgccacgtcccgcgcgccgtgctcatggacctcgagccgggcaccatggactcgctccgctccggccccatcggcggcatcttccgccccgacaacttcgtcttcggccagtccggcgccggcaacaactgggccaagggccactacaccgagggcgccgagctcatcgactccgtcctcgacgtcgtccgcaaggaggccgagaactgcgactgcctccaaggtaacgtacacgtcgattttatatatacatatcctcttgttctttaaattcactgtgtttcgttaaaaaaagaaaaaacgaatccttgcgttcatggcattcctctgcattttctctgcatacgtgtttctcgggcctctgtaaaccgtcgctgaaaatttagaataggatcatatgattctttaactttttttttggcaagatcattttagacggtggcatcctaaaagtggacaaggtttgtactttctgtgtgtatttttaggtaagacagtattatgctacacattattagcctatcaccgcagcgtgttaagatccgcatgaaaagaatctggagttttttttttcttttgttagacaacagagtaatacgccaacttggcagcattgataatgagcaatctggtatgaattgcttgtgggtctcagaaaaaaaataaaataaaaatgaattggtggttccagttatgagagtgtgaattgttcaatttgaggagcaaaacaaaccagtagtgctgcaaatttcaaggatgaatttcagtgtgcaaacttatcataccattttaggttggatttgaataggaataccagcagcaccagttgttgaacccaaatttggacatacatggaaaagaccatacatgatacatagtagtactggttggatcgggttaatcagacagaagcacaacatctttactcgtggttgaaattgggaatatcttcaaaaaaaaaatcgaataagatgaaattattattttcagtccccatcacattacaccacttccacctgtcggaatgagacattcatcctgtgtcaagttgatccattggcatgatgggaaatcgggatcaacacaggctagaaattgaggcgccatatattgttggtttaaatttcagtagttctctgtgttagatctgtaaatcttatatcgagttgaatcaactgcttaaaaattggaacactatggatacatgttatgaaggttctaaaaacttcaagtgcacaaaaaattcacagaatacttgaggtacagagtactgcttatgtgcgctgaatactatttttccctctatgcataaaaggtgaatctgactattatgcattcattcattgccaagatgtaagatatgcatgttaaaaatgttacccagtaatcagtaattatcattgttttcttgaaaatgcgaggtacaacgtatgcccaaacgaattgaacccagcaacaaactaaaaaaaaaaatcccctaactgctactttctggcgaatagaattgtcgttgagagagagttttcatcagttcctcaggtggcaaacaactggtattgtcggtcagatgcgagttttcggtacagaaatacatcaccatcgcatctcaccatcttcttttgccggtgaaggttcatgaggttatcatcatcacaataataatgtactactagtagtagaaaaacaatcatactgtgactagtgacaatgttgtacgacctaacacaagaaagagtgaaggaggaggaggatgtatcagctaatggaacagagccgtcggtggtggttacagcggatgagacactcagacaggctgttgccagtctctggtggttgggttacatgatagatcgatggatggattatattagtgatgatgttctgattacttgcatatgtacttagcatgattgcctttggacgtatttgggagatggattttagtgcacgtaatcatcagaaacagaatataaacacattttcggattcaacttacatattattagaaacacaaattagtactacaggaatatgattagtccggagatctgataggacagataatgcggtgctagtttcttgaattgtttgcactttcatgactcttaacaggggcatctgaactttagctcggttaaatgtctaaacctcaatgtacagtagagttcagatcattttcattttcagttaagatgtctcatatacttatcctaatctgagtaatgtcctataactactgatggatagttggtttgttttgatacggagggagtatgtagtaacgtgagtgacatgcaattttgtgagtgcaggattccaggtgtgccactcgctgggaggaggcacggggtcgggcatgggcacgctgctcatctccaagatcagggaggagtacccggaccgcatgatgctgaccttctccgtgttcccgtcgcccaaggtgtcggacaccgtggtggagccctacaacgcgacgctgtccgtgcaccagctcgtcgagaacgccgacgagtgcatggtcctcgacaacgaggccctctacgacatctgcttccgcaccctcaagctcaccaacccatcatgtaagcgaagcgatcatgcaccttgaccttgtgtgtgtaatttgcttgaaattaacatgatggaaataatgatcaatttgctgttgttgtagttggtgacctgaaccacctgatatcggcgacgatgagcggggtgacgtgctgcctgcggttcccggggcagctgaactcggacctgaggaagctggcggtgaacctgatcccgttcccgcggctgcacttcttcatggtggggttcgcgccgctgacgtcgcgcgggtcgcagcagtacagggcgctgacggtgccggagctgacgcagcagatgtgggacgccaagaacatgatgtgcgccgccgacccgcgccacggccgctacctcacggcgtccgccatgttccggggcaggatgagcaccaaggaggtggacgagcagatgatcaacgtgcagaacaagaactcgtcctacttcgtggagtggatccccaacaacgtcaagtccagcgtctgcgacatcccccccgtcggcctctccatggcgtccaccttcgtcggcaactccacctccatccaggagatgttccgccgcgtcagcgagcagttcaccgccatgttccgccgcaaggccttcctccactggtacaccagcgagggaatggacgagatggagttcaccgaggccgagagcaacatgaacgacctcgtcgccgagtaccagcagtaccaggacgccaccgccgaggacgactacgacgaggacgacgacgccgccgccgccgacgaggcctgatcgatcgatcgatcgatccctcccgctttgcctctctggctctctgctacgctacgctacatatatttcgatcggtacaaacacacaatgtgccgttgccgtgtctgctgctactgctgctgcttgtgtactgtgcgctactacttgttgcatgccttcgttcgttgtcatcgttgttctctgtctaaatttgtttattcatgtacatgaaccgtggtttactcttttctatctctgtatatgttaggaaatgttatctacttcattttcatgggactaaactctactgtgttcatcatgcatctcaatgtgcagtttttttatttgcaa

SEQ ID NO: 196 - DNA, 2795 bp, Oryza sativa
  source 1..2795: mol_type = genomic DNA
aggagtgggaggtggaaaccctaccacaccgcagagaaaggcgtcttcgtactcgcctctctccgcgccctcctccgccgccgctcgccgccgttcgtctccgccgccaccgccgccgccatgagggagtgcatctcgatccacatcgggcaggccggtatccaggtcgggaacgcgtgctgggagctctattgcctcgagcatggcatccaggtaaaacaaacaaaaacggatctgatgcttccattcctccgtttctcgtagtagcgcgcttcgatctgtgggtggatctgggtgatcctggggtgtggttcgttctgtttgatagatctgtcggtggatctggccttctgtggttgtcgatgtccggatctgcgttttgatcagtggtagttcgtggatctggcgaaatgttttggatctggcagtgagacgctaagaatcgggaaatgatgcaatattaggggggtttcggatggggatccactgaattagtctgtctccctgctgataatctgttcctttttggtagatctggttagtgtatgtttgtttcggatagatctgatcaatgcttgtttgttttttcaaattttctacctaggttgtataggaatggcatgcggatctggttggattgccatgatccgtgctgaaatgcccctttggttgatggatcttgatattttactgctgttcacctagatttgtactcccgtttatacttaatttgttgcttattatgaatagatctgtaacttaggcacatgtatggacggagtatgtggatctgtagtatgtacattgctgcgagctaagaactatttcagagcaagcacagaaaaaaatatttagacagattgggcaactatttgatggtctttggtatcatgctttgtagtgctcgtttctgcgtagtaatcttttgatctgatctgaagataggtgctattatattcttaaaggtcattagaacgctatctgaaaggctgtattatgtggattggttcacctgtgactccctgttcgtcttgtcttgataaatcctgtgataaaaaaaattcttaaggcgtaatttgttgaaatcttgttttgtcctatgcagcctgatggacagatgcccggtgacaagaccgttgggggaggtgatgatgcttttaacaccttcttcagtgagactggtgctgggaagcatgtcccccgtgctgtcttcgtcgatcttgagcctaccgtgattgatgaggtgaggactggtgactaccgccagctcttccaccctgagcagctcatcagtggcaaggaggatgcagccaacaactttgcccgtggtcactacaccagtaagttccatctttactactatctgttcacaatttctggaaatgtgattgtttggatgtctaacatgtggtgccgttcgtttcagttggcaaggagattgttgatctgtgccttgaccgcatcaggaagcttgccgacaactgcactggtctccagggcttccttgtgttcaacgctgttggaggaggaacgggctccggtctcggttcccttctccttgagcgtctctctgtggactatggcaagaagtccaagctcgggttcaccgtgtacccgtcccctcaggtctccacctctgtggttgagccatacaacagtgtcctctccacccactccctccttgagcacaccgatgtcgctgtcctgctcgacaatgaggccatctatgacatctgccgccgctccctcgacattgagcgcccaacctacaccaacctcaacaggcttgtgtcccaggtactgccctgcatctttccttgcagcgctatgtactccagttatttgctgtaagatcaatgtaatgtgcaatttgtcttgacatcatgtggctaatgctaatgtgctgcaggtcatctcctcactgactgcctccctgaggttcgatggtgctctgaatgtggatgtcaacgagttccaaaccaacctggtgccctacccgaggatccacttcatgctttcctcctacgccccggtgatctcggccgagaaggcctaccacgagcagctctccgtggcggagatcaccaacagcgccttcgagccgtcctccatgatggccaagtgcgacccgcgccacggcaagtacatggcgtgctgcctgatgtaccgcggcgacgtggtccccaaggacgtgaacgccgcggtggccaccatcaagacgaagcgcaccatccagttcgtggactggtgccccacggggttcaagtgcggcatcaactaccagccgcccagcgtcgtcccggggggagacctggccaaggtgcagagggccgtgtgcatgatctccaactccaccagcgtcgtcgaggtgttctcccgcatcgacatcaagttcgacctcatgtactccaagcgcgccttcgtccactggtacgtcggcgagggcatggaggagggggagttctccgaggcccgcgaggacctcgccgcgctggagaaggactacgaggaggtcggctccgagttcgacgatggtgacgagggtgatgagggtgacgagtactagagaggttcagggttcttgcctggtgccttggcaatgcttgattactgctgctatcctatgatctgtccgtgtgggcttctatctatcagtttgtgtgtctggttttgaaaaacatttgcttttcgattatgcagggtttgcttgtagctttcgctgctgtgacctgtgttgtttatgtgaaccttctttgtggcatctttaatatccaagttcgtggtttgtcgtaaaa

SEQ ID NO: 197 - DNA, 3284 bp, Sorghum bicolor
  source 1..3284: mol_type = genomic DNA
atgctcgctgcggccaccgccacctacggctatttaaccccgcactgccgacgccgcactcgcccccggcttcctccttccgcctccctccccgatctctctcgctctctcgccgccagttgcttcgcagtttggatcgtctcgaacctcgtaaggattttctgcactaccctcgtaatcgagttttgaatctgtgctgtggtgccgcattatttctgatcagttgtggcgccttagctaggagttttgtcgaattctgggttgttttcgtgatgtaaccggaaatgtgattcgatctgtggggatctgctgattattatttcccacctagtaatgtcctggtccagtgcttgtttatatctatttttcgaagaagattattcgattagtctggtgattctgggatctctactgttggatttgggggatttcgtggttcttttttgcgactaatcactcgatctcggaaatgtaactgctagaacttagatgttgaacagttgtggactacaaatttcaggactgaaactagatctggaattgacgtcaccgtttgaactgttgagctcgcgaggaaatatcgactagatctgctataaatattgatgcatttagtacttagtagtaggaggcgactcagttattgatgtgtggaagatggttttgaaaccccagatcttgcaagtgttctatgcgattagagtaggagttgatgtgtggaagatggttttgaaaccccagatcttgtaagggttctatgcgattagagtaggagttcagtgacattcagatctgaaaacgtgagctcgcttccagtaagggttctaacttgaggagggtgacaactagcaaatgcttttatttccattcgcacagtattccaagttggtgtgcttgtggcagtatctaaaactaattcctatgcacttctcttgtttatagggcgaagatgagagagatcttgcacatccagggaggccaatgtggcaaccagatcggtgccaagttctgggaggtggtgtgtgatgaacatggcattgaccctactggccgctacactggcacttctgaccttcagttagagcgtgtcaatgtctactacaatgaggcctcctgtggccgctttgtgccccgtgctgttctcatggaccttgagcctgggacaatggacagtgtccgcactggaccctatgggcagatcttccgccctgacaactttgtgttcgggcaatctggtgctggtaacaactgggctaagggtcattacactgagggtgctgagctcattgactctgttcttgatgttgtgaggaaggaagctgagaactgtgactgcttgcaaggtacttgagctttattgttgataaagctgattgtttatagttgttagattagatctgttaagagtgagatgtacatgttcaaatatctcctgctttttaccatgcttgtgattttttttttcagtatgatgcaatacattatatccatctgactgatgctatccatgggacctagaaccgcaatatcttgttattattataaagttgctattgctcttgaaagtcatttcgcttgttttagttcatgtactgtatttctatatcatcttaaatgacattgatacttggttattgctgatgtgcttagtaatttcacatttcagtatctagacactgatacttgtggttattgctggtgtgcttagtaatttcacatttcagtgtctatcttgtgtgctgttgacatgttttgacacaggatcagaaacaaaaagttatattcttcaatttatatggaagtgtagaatcttgcacttgttgcttgaacaattgacattctgactgtgattactatcacctctgtgtgtcatgtatcttggttgccatgtgtactttattaactgttgttttttcaattgcctgtgcaattaaacttgattaccatgctacattaaatattaactcaatctatttgtttgttcaggattccaagtatgccactcccttggtggtggtactggatctggtatgggtacactgttgatctcaaagatcagggaggagtaccctgaccgcatgatgctgacattctcagttttcccctcaccgaaagtatctgataccgtggttgagccatacaatgctaccctttctgttcatcagttggttgagaatgccgatgagtgtatggttcttgacaacgaggccctctatgacatttgcttcaggactcttaagctcaccactcctagctgtaagcaacctcattctttctcagttttatccttcaggttgcagatatatcatatatgcttgcttgtactggtgtatttacagatatgataacacactatatttgttaatttctgcagttggggatttgaaccatttgatctctgcaaccatgagtggagtcacctgctgcctaaggttccctggtcagctgaactctgacctcaggaagctggcagtgaacctgatcccctttccccgtctccacttcttcatggttggctttgcgcctttgacgtcccgtggctcccagcagtacagggccctcactgtccctgagctcacacaacagatgtgggacgccaagaacatgatgtgcgctgccgaccctcgccatgggcgttacctcaccgcctcggccatgttccgtgggaagatgagcaccaaggaggttgacgagcagatgataaatgtccagaacaagaactcgtcctacttcgtggagtggatccccaacaacgtgaagtccagcgtgtgtgacatccccccgaggggcctgtccatggcgtctaccttcatcggcaactcgacttccatccaggagatgttccggagggtgagcgagcagttcactgccatgttcaggaggaaggctttcttgcactggtacactggtgagggcatggacgagatggagttcaccgaggccgagagcaacatgaatgacctcgtgtcggagtaccagcagtaccaggatgcgactgccgatgatgagggcgagtacgaggacgaggaggacgtgcaaggagatgaaatgtgagaggctgtgatagtgtgaagcctggtggttctagggcaggcagaccttgatgggtttggtgtcccctttcgtattgttgccgtgttactactgctagcgtaccaccctcgtggcccattctgtcgctgttgatgcttgtattttccttgtgctatggaaccttgcttttggtacgatgctacttatgctgccagtattcttggcgtttaaggttcctgttgtgaatttta

SEQ ID NO: 198 - DNA, 5077 bp, Sorghum bicolor
  source 1..5077: mol_type = genomic DNA
ccctcccctccgcctcgcttcgcttgcctcgtcacttcgtcagtcgtcacctcacgctccgtcccaccgccaccaatcgcactcgcagttggcgcgcgctcgcgtccaaaccaagcaaaccccccaaaaccctagcctccgccggcgccgccaccggccggcctccttccctccctccctccctccctcactcagacccctaccctcgcagcacccttaaccctacaccctctcccgccgccgccgccgccggagcagggaaaaaaaaatgccgcgcgagatcatcacgatccaggtggggcaatgcgggaaccagatcgggatggagttctggaagcagctatgcctcgagcatggcatcggcaaggacggcctcctcgaggacttcgccactcaggtacgtcccccacgccccgcattcccctttctccccggtccccgtcagcgtgacctgtccgagtcctcctctcctcacgcgctggccgcggttgagtcgattgatggcggtttccgggttgctcgagatcagtgccgcgggtgctctgatctgtgatgtttgtggatatggcggcgaggccaggtgactagtttttggacctctgctgtagggagtattctagtagaattctcacaagtcgcgcctaagtatttgtgagaatttttgagatttcaactggtattgtgattggggtgcggaatttagctttccttgaagtgtcaacacgttttttttaagggattagtgtttaagtggtttttggtatcggtgtgtagtgttagatttagctggaattaacgagaactgcatacaagaaattaaatgaacatttcgaacttagaacacccatgtatcatgtgcctcattatgctggaaactgcttctccaacctaattgtgcagcccttaaaagcatccactgtaacacttatgtttctgtctgtattggatcgatgcagtatttgccctttctgtttatctgggaaggctaaattaaacaagagccagctttaattgcttaagttacctgcaggggggcgacaggaaggatgtcttcttttaccaggctgatgatcagcacttcatacccaggtctctgcttattgacctggagccgagagtgatcaatggaattcagaacagcgagtacaggaacctgtacaaccatgagaatatatttgtcgctgagcacggtggtggtgccgggaacaactgggccagtgggtatcatcaggtagagtcgcgctgtgtatctctgtttcgtgttttagaaagaaatgctcaaatgccttttgatattctcatagggtgaacaagttgttgatgatatcatggacatggttgacagagaagcagatggaagtgatagccttgagggttttgtcctttgtcactctattgctggtggaactggttcaggttggctatctggctcttgtattttcattttctttctttgcatttttctattatcctcccacttttctgttcatactgcatattgtgcttggagtattttgtggtgcttaccatctgactcactgtacattggatgttgccttgttattatgaaacatttaaacagttattctccttccatttgtctaattgtcctgttgcccatgttcattcaggtatgggttcttatctattggagacactgaatgatcgatacagtaaaaagcttgtgcagacatatagtgttttcccaaatcagatggaaacaagtgatgttgtcgtccaaccttacaactcacttttaactctgaagcggctgacactgaacgctgactgtgtggttgttcttgacaatacggctcttaataggattgctgttgagcgccttcatctatcaaatcctacttttgcacaaacaaactctttggtctctactgttatgtctgcaagcacaactactttaaggtatcctggatatatgaacaacgatctggttggccttcttgcctccctgatccccactccaaggtgtcattttttgatgacaggttatactccattgactgttgagcgccaggtaatttgatatcctctgcctcagttgttacattggttcatgtagcatgttttatgtcacattttgtagcctttgtggaatctgtagttacctgtgcttgtccattgactgcaattttgggacacttcatcaaaagaattagggaaagtaattaaattgatgtttgttttgggcgaattgttgaacaattcagttatattggatgtgctatgtggcaggttaacatgatacgcaaaacgacggtattggatgttatgagaagacttctgcaggtattacctgttactgtaggatgggtggttaactatcaagtgttcattaagtttgaatcctttatttatgaaatattgcagacaaagaatataatggtgtcatcttatgctcggacaaaagaagctagccaagctaaatacatctccatactgaacatcattcaaggggaggtggaccctacacaggtacagttttgtcaaatgatttttcttctgaagtgtggatatatcttggtcaaatctaatggtggcatcacgagataagatttgccaaatgctgaagtgtagtgagtagttacttaggagttacctacatggaatggtgaatggtcatctgaaattctaaataaagaattcatgataaaacatggtagtttcataccattcattctcttcccattttactagaagaagttgctggaaacctataaaagtttaagatatgttgtttcatcattacatcaaacacctttctccttagtcttatacaatgtacactcctatatatactccacattggctggaaatgacatgaacgttcagtacaaatctgtaaattgattttcatacatactagcatggtggcatgttatttgttagttaataacttttagttggagtaagatatggtttaagtttttttccttttgtgtaccatgaaattatttgtttgatgtcttattttatttggtcttgtcatggatttaggtccatgagagcctgcaaaggatacgcgaaaggaagcttgttaactttatagactgggcacctgcaagcattcaggttatccttttttttttgtaaccattcaggttatcacacaaaaaatacctttttgtttccttgcctggcattaaaatccgtaagcatttcaactgcaacaggttgctttgtcaagaaaatccccatatgttcaaacaacccacagggtacaattatctcttcctcctaccttctctccctccctcaccttctggtgggatttcagtcttttatttcttttgaagaaaatggatgatgctgtactaacgctgtgctacaggttagtggtctgatgttagcaaatcatacgagcatccgtcacttattcagcaaatgcctggggcaatatgagaagctaaggaaaaagcaggcttttcttgacaactacaggaagttcccaatgtttgcggtaagaacatatttcaacaagttttgaatctcctagatcattgctttgaattgtttagggtacatgcatattttgagctgcttacttagctgtctgttttgaaattactgtattccctgtttagttggtgttgtcaagttcaggaacctttctgatgccggttcaactaaaactctaatcttgcagttgcaaaggaatttagataccgtttcattattacttacaaagattacaattgccaacgtggttccttggataatgacaagcatatgtaaatattcttgagaacagtacttccaactgtgtttgaccttgtggatgacttcattcttttgtgtgacatgctgacctctgacaacttcatgcaggacaatgatctctctgaatttgatgaatctcgagagataatagagagcctagttgatgaatacaaggcctgtgagtcgccagactacattaaatggggaatggaggtaagtttaatgcaattcaaatcttgttctgtgcattatataaaatgctgagcaatctgttccaaagcaggaccctggagaggcaaacgttgcggcagcacttgactctaagttggtagtgtaaatgtaaaggtaccatctcacgatcaggcacttctatgcataaacaatttgatgcccaatcatattgaattgaccatccatttgaaaccttgattccttgctttcttttgccaaccatgtggactaatctctgctagattttaaaaatgactgctaaatacctgggcatatttttgtatatattgctggcaaacaacagcttcacactgcaaggctctacttttcttgagggagctataatgttctcagtatcgagaaattcttagacagttttcactttcagaagcagataattatggtgttgatatcctgacatactatgttatgaatttgataatttggaaactgcactgttccagcaaatgacacaactgaaggaaggctctctacatgcaggtcctgttggtcatccaaagatgctactggcactatcttgtagtcatcagttcgacgccgcctgcctatctagatcctatcggagtgcagccaaagcgggttatgaagttatttcgacctcaaagtttgtctttctttagtctgtgctatgtatattttgaaacccacttgccctggcctgtgtgcattttccctttaaggtcttgtgactgcgctctttggtggtgatggtgatggtgatgttttcggtgtcctttaaggcttcgatgctgatagttccaattgtgccgagtgttccttgctgatgacttagaaagagttttagttgatctaatttgtgggcctggtccccatcctgtgatgctgtgcaatcgtctctggcaatgtttttttagcttgttgggtatgtaaacatgatttttttttctctgaagagagcatttactgtcttaaagaggggacatggtcacatagaagtacgaaggtggaatggctccatcttcttgtggatctgtaaaagctagtattgattcccatcgtctactgattactgaagtttctgaaatcgccttttactaaattatgttgttaataaaatatgaaaattggt

SEQ ID NO: 199 - DNA, 2968 bp, Sorghum bicolor
  source 1..2968: mol_type = genomic DNA
tcccaataaaaacacgagtctcacccgctcgctcctccgttcgtccccagccgcgcgcggagccctccaccaccctccagacctctgctccccaggcctcgcctcgcctcgcctcgccgcgtcctcctccgccgtcgccgccgccatgagggagatcctgcacatccagggcgggcagtgcgggaaccagatcggggccaagttctgggaggtgatctgcgacgagcacggcatcgaccacacgggcaagtacgccggcgactccgacctccagctcgagcgcatcaacgtctactacaacgaggccagcggtggccggtacgtcccgcgcgccgtgctcatggacctcgagcccggcaccatggactccgtgcgctccggaccctacggccagatcttccgccccgacaacttcgtcttcggccagtccggcgccggcaacaactgggccaagggccactacaccgagggcgccgagctcatcgactccgtgctcgacgtcgtccgcaaggaggccgagaactgcgactgcctccaaggtactgtctcgtcgtcgtcctcgtagatctgttccttctgttagaaatgctggaaaattggtcgcgattttggggttcgtcatcgtccggatctagtccattttctatagttagaatgacatgttacgatgtcgtggttctcggctcgcagatctagccgatttgttgccatgtttggaaacctatgtagatctgtgcgttttcctcgacattttcgagtatgcataatatttatgcggttacttggattaaatacttggttcggtttcccgtagtaattgtttatgcggttcaaagtatggagatccagtgactctgtaattgcccgactagttctggtagcagcagcaagtttgttcaattgcagcgttcatagcatttaatttggcatctctgccggcatggatagactttatttgtatgatgcttcgccacaaattttgcctgcctgttttggtccttggctatttcgtactactagtaactgtgaagaatttattgagccatttaacttgtgagagatgaacttatataactgattattttctttactgagatgagcttatataactgatgatttaacttgtgagagatgagcttttataactgatgcgttcatggccacaaccttacaactcatcttggctattggttactggaggatatttgcttatggttcatgttagggtgtttgctgggtttgtccatcttgatgtcatcttattatctacaaagtaactagaatctcggttattggatatttcgttgaaacaaaagtgctatatgttcgatttatgcttcacctgtgaaattgtatctgaaatatttaccttttttttctgcaggatttcaggtttgccactcattgggtggaggtactggctctgggatgggcaccctgctcatctcaaaaatcagggaggagtacccagataggatgatgctcacattctcagttttcccatcacctaaggtgtctgataccgtggtagaaccttataatgctacactctcagttcatcaacttgttgagaatgctgatgagtgtatggtccttgacaatgaagctctttacgacatctgcttccgcactctgaagcttgctacacccacttgtaagtttgcattgcaactttgttcagtcactgcacctacaactttagtatttattgatcattgatttcatatcgtgatgcaaaagagtggattgtagtagtagtcatcttcgtgtggaatcctgtgacacacatctatctcttggatgtcctgtgatgctgcaatgaattaccatgtccttgtctgcaattgctgcatatttattgcaatcatgcgctacttgattgaattaatgtgtatgtcgggcacatgcatctcactagcattttgacaccgtacggtctgttctggagtttgctttgtactacagaatacattgtaatgccctgagatgatcgtttcatgattctctgccctgttccttgcatttgtttctgccatttagatatgaatctgaatcatgcttttttatgttgttccagttggtgacctgaaccatcttatttctgcaaccatgagtggtgttacctgctgcttgcggttcccaggccagctgaactctgacctccggaagctagcagtcaacttgatacccttccctcgcctccatttcttcatggttggttttgcaccactgacatcaagaggatcccagcagtaccgagccctcaccgtccccgagctgacccagcagatgtgggatgccaagaatatgatgtgtgcagctgacccacgacatgggcgctacctgacagcatcagccatgttccgtgggaagatgagcaccaaggaggtggatgagcagatgctgaatgtgcagaacaagaactcatcctacttcgtggagtggatcccgaacaacgtgaagtcgagtgtgtgcgacatccctcccacgggcctgaagatggcgtccacattcatcggcaactccacctcgatccaggagatgttcaggcgtgtgagcgagcaattcacggccatgttccggcgcaaggccttcttgcactggtacaccggggagggcatggacgagatggagttcaccgaggccgagagcaacatgaacgacctggtggctgagtaccagcagtaccaggacgcgacggcggacgacgaggaggagtacgaggatgaggaggaagaagaggtggctgcctaagccaccgaccggcccatgtgggttgtggtgttattactgtttctcttaatctgatgcttgtggggtgctcttaggttatttctggtgttgatggtgtgatactgctgcgaaactgtgacattagttttaactgtggacttgattacttctagatcatggaattgtcaatctgatattagatgtattctatgttttggtatctttcgctgtgcta

SEQ ID NO: 200 - DNA, 1958 bp, Sorghum bicolor
  source 1..1958: mol_type = genomic DNA
cccccccaaaccctaacactccccttcttcttcttcactcccagacccagatctcttccccaccgccgccgccaccggccccaaatctccaaatcccccaaccggccgccatgagggagatcctccacatccagggcggccagtgcggcaaccagatcggggccaagttctgggaggtggtgtgcgccgagcacggcatcgacgccaccggccgctatggcggcgactccgacctccagctcgagcgcgtcaacgtctactacaacgaggcctcctgcggccgcttcgtgccccgcgccgtcctcatggacctggagcccggcaccatggactccgtccgctcggggccctacggccacatcttccgccccgacaacttcgtcttcggccagtccggagcaggcaacaactgggccaagggccactacaccgagggagccgagctcatcgactccgtgctcgacgtcgtgcgaaaggaggccgagaactgcgactgcctgcaaggttggttcgccatctttactctttcttttttcttccctttctacgctagagatctgcgatgcccttggatctggtctcgactcactccatttctgatgccatgggcggcaggcttccaggtgtgccactccctcggcggcggcaccgggtccggcatgggcacgctcctcatctccaagatccgcgaggagtaccccgaccggatgatgctcaccttctccgtcttcccctcgcccaaggtctccgacaccgtggtggagccctacaacgccacgctgtccgtgcaccagctcgtggagaacgcggacgagtgcatggtgctcgacaacgaggcgctctacgacatctgcttccgcacgctcaagctcaccaccccgagcttcggcgacctcaaccacctcatctccgccaccatgagcggcgtcacctgctgcctccgcttcccgggccagctcaactccgacctccgcaagctggccgtcaacctcatcccgttcccgcgcctgcacttcttcatggtcggcttcgcgccgctcacctcccggggctcccagcagtaccgcgccctgacggtcccggagctcacccagcagatgtgggacgccaagaacatgatgtgcgccgccgacccgcgccacggtcgctacctcacggcgtccgccatgttccgcggcaagatgagcaccaaggaggtggacgagcagatgctcaacgtgcagaacaagaactcctcctacttcgtggagtggatccccaacaacgtcaagtccaccgtgtgtgacatcccgcccacgggcctcaagatggcctccaccttcatcggcaactccacctccatccaggagatgttccgccgcgtcagcgagcagttcaccgccatgttccgcaggaaggccttcttgcactggtacacgggggagggcatggatgagatggagttcaccgaggccgagagcaacatgaacgacctcgtctccgagtaccagcagtaccaggacgccaccgccgacgaggagggcgagtacgaggacgaagaggaaggagacctccaggactagatgcctccctcatcgtttgccgtgctggtgcttcagtcatcaaaaactaatcatttgcctgccgtgcttcatctaaattattcatcttgccgttcttagtgtgggtcaatcatcaaatacttagtgtcgtggttggagttaattattagtcctagtagtagctgccgggtacttgttccgtttgtggcacaacacaagggaataggaattgcaataccctgttgctttgcttgtttctgttactgtatgttagttattcagtgtcatgtgtctgactgtcttgagtctgaccatttattggtatcgttattatgttaacctaagggaatccagacttgcttgttatgaaattctgaattgtactgctcctgtaatccaattcggctgtgcctgtga

SEQ ID NO: 201 - DNA, 3011 bp, Sorghum bicolor
  source 1..3011: mol_type = genomic DNA
ggcatttatcgttcacctcggcgtcttcacaaacgccggcgcttccactctcgatcgatcgatcctcgaccattccccattccgtcctcccccgatcgatcctcgaccattccccttcccgtcctcccccgatcgacgagcggttgtctgagagaagaggaggaagatgagggagtgcatctccgtccacatcgggcaggccggcatccaagtcggcaacgcgtgctgggaactttactgcctcgagcacggcatccaggttcgatcgcgtcatgttgtcctcctcgctatgcattcccatcatcgtcttcgattgatttctgatatgttgtcgaggagctctacgatttgcagttgcagggcgttagtactcgaatcggggtgaagtggttaggttattttttcgtcagatctgttggtagtactggtagctctagggtttgaaatttcctgcgcgatttaaactgcgatcatcatgtgtttgggtgtattgtggattttgtttgcgattaatactttgcggcggaaataacatgctgttccgatcgaattttatatctcgtattctcccgtttgttggtggtcacgcctattctcagtcggattgcgatgtcgtaattagtcatcggccgttccgtggtcggtttggatctgttttgtgcgtggatgaactgcactatctctgtatctgttattgtcgactaggagttgattgaattctcattatcatttcgtgaatcaagctttgattctgtaagttttactcatgttgttttcatttcttcgatctgattccaaattggtctaggggaatgatgctttagtttgtgctgtttaattgtaataaaataaaatttctctctgaactgcgcgatttctgtatctgttattgtcgatttctgattctgtaaattttagtcatattgttttcatttctgcgatctgattgcaaattggtctaagggagtgatgctttagtttgttatgtgcaactgtaatttaactgtaatgaaatttctttttcctatgaactgcgaaatctctgtttgtcgtctaggagttgattgaattgtacttttatttcgtgaatcaagctctgattctgtaaaattgcctacgttctttccatttcttagatctgatcccaaatgagaatataggaatgccgctttaggttgtgctgtgcaactatggcggaattgaaatttccatttcctattaatttgagttgccactttgttcctctgaactgaatctaatactaattaaatcgatggtatgctggacccttgcaacgcaactttgatccttcacgatatgatctgaattgcatttaatacctttctgatcttcgcagcctgatggccaagtgcctggagacaagactgcgggacaccacgatgatgccttcagcaccttcttcagccagactggtgcagggaagcatgtgccccgtgcaatcttcgttgatcttgagcccactgtgatcgacgaggtgcgcactggcacttaccgtcagctcttccaccctgagcagctcatcagcggcaaggaggatgctgctaacaactttgcccgtggccactacacaagtaattgaccatctaaaaactttgcctgttccacagaattagctcatctcaactcatttatggttgattgattactgatgcatcatgctctttttcctgcagttggaaaggaaattgttgatctgtgccttgaccgcatccgcaagctcgctgacaactgcactggccttcagggcttcctagtcttcaatgctgttggtggtggcaccggctctggacttggttcactcctccttgagcgcctgtctgtggagtacggcaagaaatccaagctgggcttcactgtgtacccatctccccaggtgtcaacctctgttgtggagccctacaacagcgtgctctccacccactccctcctggagcacactgatgtctccatcctgctcgacaacgaggccatctacgacatctgtaggcgctccctggacattgagaggcccaactactccaacctgaatcgccttgtgtctcaggtagaacaattgctttatactgggggatgtgctggttttgttcatacatatgtgctctgattttgttcatacatccttgaaaccgatgctaaaatgtatgccttaaactgttttggtgtgcaggtgatctcatcacttactgcttccctgaggttcgatggtgccctcaatgtggatgtgaatgagttccagaccaacctggttccttacccgaggatccacttcatgctctcctcatacgcgccggtgatctcttcggcgaaggccttccacgagcagctgtcggtggcggagatcacaagcagcgcgttcgagccggcttccatgatggtcaagtgtgacccacggcacgggaagtacatggcgtgctgcctgatgtaccgtggcgacgtggtgcccaaggacgtgaatgctgcggtggccatcatcaagacgaagcgcaccatccagttcgtggactggtgcccgacggggttcaagtgcggcatcaactaccaggcgccgacggtggtgccgggggctgacctcgccaaggtgcagcgcgccgtgtgcatgatctccaactccaccagcgtcgtcgaggtgttctcccgcatcaacagcaagttcgacctcatgtatgccaagcgcgcgttcgtccactggtacgtcggcgagggtatggaggagggggagttctccgaggcacgcgaggacctggctgccctggagaaggactacgaggaggttgctgcagagggcggtggtgatgacggtgaggaagacgaggagtactgatctgcttgcatgaatctctttggctgtcgagcgaggttgcggtgtcgaaaaactttttccgtttgcgtcctgggtagtgttgttttttgctttcatgtcacttgctgaactgctgtagtagttgcatgtcataattgaagtatgtcgcttaagcactgttggttccgaa

SEQ ID NO: 202 - DNA, 3761 bp, Sorghum bicolor
  source 1..3761: mol_type = genomic DNA
tctgctttctgaagaacgttcccgttgacgccgctacgctgccttgtcctcttttcttcccttctaccctgccgcacgcccccttcttccgtgtgcagtggtgcaggccttttcggccctcaggcttcttcccttcctttccctgcttcggaactcccgaggctgcataacctgattcagaggcagagcgagagagcgtgaggaagggagggagatgagggagatcatcagcatccatatcgggcaggcaggcatccaggtggggaattcttgctgggagctctactgcctcgagcacggtatccagcctgatggcctcatgcccaggtgaggtccttttccgttccaatttccgcactttctgtttatctcatccttccttaagaattcagtcgagttttgatctatctcagatgattctagctcagataattgtttcagatagggctgacttctgggttcttgtagcatagcctcaaaaaggttgtattttggagataatcctggaatattcataatcctgaggacaatcttgtgtatcacagcccgaagtaaaagctagagaaactttgctggatgctctttttttacgagttgatggcacccctgcgttcaaaaccacttgcttataaaaaagttaaaaaagggccatgatcggataaaaaaaacctgcatattaagaagctcaggttgtcaacaagcaggataagcatgtgacaccgatttttgtgtccaactcacctattttacagcatccaatttctcaaccttggctgtttgcttgcagtgacaactctgttggggttgcgagggatgcattcaacacattcttcagtgaaacgagcgcagggaagcacgttccaagggccttgtttgtcgacttggagcccactgtgattgacgaggtgaagaccggggcataccgtcagcttttccatcctgagcagctcatctcacacaaggaagatgctgcaaacaactttgcccgtggacattacacaggtgtgacatgttgtccctcaccctgagccatttcctggagaacagaaaatgtgttttgcaatttaaaatgcaatattgaattgagcacaaataattggggtttgaaagccctatcttgaactttggtgcattgcaaatgcgtaaagaacaaatttgtgtgtttgaatagtactagcaagtggcaggtagaactaatccacaacagtttggatattatacaggggtcaggatcttataatttaaacgttcaaccatcctatgccatgatttctgtagtattgtccatgacttcatatcatacaaaaaacatcactttctttacctggggcacttattttgaaaaaattacaatgctttggaactgttctctgctctttattaataactatcctgtttggggatggagtaatatccgaagttttacaatatgtttttctgctgcagttggaagagaagtagtagatctttgccttgatcggataagaaaattggcagacaactgcactggtcttcaaggttttctggttttcaatgctgttggtggtggaaccggctctggccttggttcgctacttttagagcgtctatccgtagattatggtaggaagtcaaagctcggtttcaccatctatccttccccacaggtatcaaaatgataatttgagaccatttatgtatgcatcatttggtcatcacaattactaagcccgctcgtttcagctggctgcggctgcactagcactgtctacagtagtttgcagttttgaggccacagccaaaagtagctgaagttccagtttctttgtgggcaattaattacagactaaattaccatctcaagaaaagaattgtagtattaagtgtgaaccattaaaaagaaatcacttcaatggtaaatctgaatcgtgatttggcaagattacagatacaaaaatatccatcttgtcatcagttttgatatacaacaaaaatctcaaattcaataaaatgataaattaaatatttgatagtaactttataagaaaagtatagataagtcctactttgagtttttttacttgaaaagctaatctaattatttcggacttttaccttatctttccaacaagtatgttgtttttgtcaagtttctggaagagctatgataaagcataaattttatggccattacagttgagctacctgtgtcagtgagaagaactccatttattcttgcaataagacatagcttgcatacagaaatatatccttcactgaccatccacctatcattcattgtagtaaaaataactctcaaaggatcttcatgagatttactatattaagtataagactcaaagcccggatattgtgcgagaccatctatgtctagacagtgaaaatgtgtgagtgaagaatattaatatcaatgtttatgcccacatagtggttaatagtacaatatctaaatctgtatgcttgagagttgagacaagagtgagtaaaaagagttaatatgcaaaattactattttcatatacctagctaaaggcataggcttgtcttctcaatcagataacaaaagcttgcaaaggaggtttacctgtcattgtaacttacaagaactctgtactgaaaccatttcctgttgcagatctcaactgctgtggtcgagccttataacagcgtgctctccacacattccctgattgaacacaccgatgttgttgtgcttcttgacaatgaagctatatatgacatatgcaagaggtcccttgacattgagcgtccaacatacaccaatctgaacaggcttatatctcaagttatatcatctctaaccacgtcactgaggtttgacggagccattaatgttgacataactgagttccagaccaaccttgttccttatccccggatacacttcatgctctcttcatatgctccaattatctcagtggagaaggcctaccatgaacaacactctgttcctgagatcacaaattctgtgtttgagccatcaagtgtgatggcaaaatgtgatcccaggcatggtaagtacatggcatgctgtttgatgtaccgtggtgatgttgtgccaaaagatgtgaatgctgctgtccattcaatcaagaccaagagagcagtgcagtttgttgactggtatatgctcacaactcttaccaagttatattagattatagactgttttctagcgaaaatgtagctgcacgagacatgaacatctttctctgttgcctcatgcacaggtgccctactggcttcaagtgcgggataaactaccaaccaccaactgtagtccctggaggggacctggccaaggtgcaacgagcagtctgcatgatcagcaacaacacagctgtggctgaggtcttttcccgtattgaccgcaaatttgatctcatgtatgcgaagcgtgcattcgttcattggtatgtcggtgaagggatggaagaaggggagttctcagaggcaagggaggatcttgcggcactggagaaggattatgaggaagtcggagctgaagttgaagatgatgatgaggaagctgagtattgagtcatcccatctggatgcatggttattttcctttggtatcagtcaaccaggagtgcttgggttgcatggttgtacctcccatttgtttccctgtttgctattgcattacacctgttcatgattgccagagtagaactgtgaagattggttgaactggtgtgatggtttgagataaaataaaataagtattaaaaatgtca

SEQ ID NO: 203 - DNA, 3872 bp, Sorghum bicolor
  source 1..3872: mol_type = genomic DNA
gacgccctccgtcccacccgcttcggctggcttctcgctcgatcgctcgctcccacgcccctcgcctcccctccacaaaccaccaccaccaccgccgcgatccaagaccgcatccgcggcgcatcgcgagagagagagagaggggttcggcaggtcggggggcaagatgagggagatcctgcacatccagggcggccagtgcggcaaccagatcggcgccaagttctgggaggtgatctgcggggagcacggcgtcgactccacgggccgctcctcggggacctccccgcagcagctcgagcggatcaacgtctactacaacgaggccgggggcggccgctacgtgccccgcgccgtgctcatggacctggagcccggcaccatggagtccatccgcgccggacccttcggcggcatcttccgccccgacaacttcgtctacggccagtccggcgccgggaacaactgggccaagggacactacaccgagggcgcagagctcatcgactccgtactcgacgtcgtgcgcaaggaggccgagaactgcgactgcctccagggtatgatatgcacttataccgacctacctacacatcaatcaatcccacgctaggcttggctaggtgttcggtgttcctttcgtcgatctcgtgtttcctccgtggatcggtcgtgctctgtttcgtgcgtcaactctgctccttatggcattgcctgtttctggaatctgtttcatagatcagccatttgagcgtggtactacttagaaaaaaggaatacaaatgcaacgaacacccgatttcgttccaaatctgtcacactagtttttttatttgtcacgtaaattgtaaatctgcaatcatcctgcatttccgcctcttatagccatatagagggatcagagatgcacgcgatcgttggatcagtcaatgcttgatcccttctcgtgaggacaggaatagcactaacactaatacgccggcttagcagcatgtacagacaggccttgataggtagcagatcgtccagtacagttggtgtcaatttggtgaatttgaactcttcaaggaatatagattcaaggaaactatatatttttatatcgatttattgactgtatccaaagaatacctggtttagtagcaggattcattgaaagatcaatatcatttttccttttctgatcattcttactgcagtagtactgttcaactgataattccattgagatggttcagcatttatctgcattcatcttggatgcttatgatcagttgaatgaaattactgaagctttgtgataaggagccaaatatgacaattttctaattgtttgctagacacacccacggacttaataattgcagatttgaagtagaaactcgatgctacacaacattcataatattagatgagctctgtcattcttttttatcttaattgaccagttgacagttacatttgtgtgtgtcggtgtagctattttttaaccaaaagtaatcatgaggttattgcttaatagttcatacacacactgcagttctgaaaagaagttagattagacctgtctcacctgttgctcagtttttctctgcaatctgtgtactgcaactttgctagtggcaacggggccatgtgttttcaactaaaatatttatcagtgggtacatagaaacatgatcatggccaagcggaacttattgccatgcatttgttgtcctcgtaccaagctatgactagttaagcacagatttagctggccaagtgccctgtctgtgaatgttagtttcatcgctagctatatgtgaaatttttactgaacataaaaagacacaaattgctgattgtaaaatttactcctctgttttctagactagagactagagatatgggtttcagtactttcaggtactaatgacctggtttgtctcggttagaaaccagttttcagtactgaagcatgttacatcacatgtcaacgtcttcttaggctggtgaaagttcttgagattatctcaataacacactaataatggtattatcattctctgattaatgacaatgctgtacgacctaccaaaataaaaaaagcaagtatctagatctgctgctactgtaacagtgtcggtggtggttgcaacgaatgagacactgagacaggctgtacccagtgggctggtggttgggaggattactcatgtgttgcttacttgcttagtgtatatacttgcattattgcatttggacttgtatgaggtgaaatggattttagcgcatctaatcaaagcagcatgataaaaaacataaagtcagttatacaatacataacttgacactgtactatatgattattgagatcaagtttcctgcggttcatgccttttcgatgggctttgtacatgatcgaagtttgcacaggtcacagcgtatccagaactcaaactgtacgtctgccattgacctgacattgctcgcatatttgacagggttccaagtatgccactccctgggtggcggcactggttctggcatgggcacgctgctcatctccaagatccgggaggagtacccggaccgcatgatgctcaccttctccgtgttcccgtcgcccaaggtgtccgacaccgtcgtggagccctacaacgcgacgctgtccgtgcaccagctcgtggagaacgccgacgagtgcatggtccttgacaacgaggcgctctatgatatttgcttccgcaccctcaagctcaccaacccttcatgtaagcattatctcgttcgctttcatgcatgctgccaaaatgccaacgcgctaacaattgccgacggatggatccaaaatgaatgtgcagttggtgacctgaaccatctgatctcagcgaccatgagcggcgtcacgtgctgcctgcggttcccgggccagctgaactcggacctccgcaagctggcagtgaacctgatcccgttcccgcggctgcacttcttcatggtcgggttcgcgccgctgacgtcgcgcgggtcgcagcagtaccgcgcgctgacggtgccggagctgacgcagcagatgtgggacgccaagaacatgatgtgcgcggcggacccgcggcacgggcggtacctgacggcgtccgccatgttccggggcaagatgagcaccaaggaggtggacgagcagatgatcaacgtgcagaacaagaactcctcctacttcgtggagtggatccccaacaacgtcaagtccagcgtgtgcgacatcccgcccgtggggctgtccatggcctccaccttcgtgggcaactccacctccatccaggagatgttccgccgtgtgagcgagcagttcacggccatgttccggcgcaaggccttcttgcactggtacaccagcgagggcatggacgagatggagttcaccgaggccgagagcaacatgaacgacctcgtcgccgagtaccagcagtaccaggacgccaccgccgaggagtacgacgaggaagagcaagacggcgaggaggagcacgcctgatcggaggccaactgatcgatgcaaaggacttcagagacttcgctcctatggtacaccaatcgagactacacattcctacaatcctactactacgtaccttaagtatgtacattcagtactgccgtatttccgttactgctgctagcttgtgtgtgtatctacagtcgtgtcactctcgtgtgtgttagtgttttgtgaacttgtgatatactgtcaccgttgtccaggttttgtgcgtatgtttattcatatgatgggattgctctctgttcttgtacgtatatgttaggaatattcatttcattggaagattgttttgcctgtactcgttatttacactcattctgaagta

SEQ ID NO: 204 - DNA, 3333 bp, Sorghum bicolor
  source 1..3333: mol_type = genomic DNA
ccctcctccagctcgaaggctctcggtggaagtcgcacgggggcaacagcatagagcagcatttcaaatccgtcctcacctatagacaagaccgcaagcccacagcacccgagagaggtcgagaccgtgcgccgctccccgcccgccttttccccgcccgcgtccgacctcgaccccagccccggcgagccagcaggcaggcgtcagccatgagggagatcctgcacatccagggcgggcagtgcgggaaccagatcggtgccaagttctgggaggtgatctgcgacgagcacgggatcgacgccacgggccgctacgcgggggactcggacctccagctcgagcgcatcaacgtctactacaacgaggccagcggcggccgcttcgtcccgcgcgccgtcctcatggacctcgagccgggcaccatggactccgtgcgctctgggcccttcggccagatcttccgccccgacaacttcgtcttcggccagtccggcgctgggaacaactgggccaagggacactacaccgagggcgccgagctcatcgactccgtcctcgacgtcgtccgcaaggaggccgagaactgcgactgcctccagggtatttactctgcccaatcccatccctcgcgctctccgattttcatagcttttccgcttctgattagggttattagatccggttgggttgggagcgttaaaatctatagtccagatccgagtccttggggatatgaatgacattaaaatgacctccaattggcatttctgcgaggtgcttttttcatcgtcggtcgcatttactagtaattttcgtcctgtgtgctgatgaatatgccaagtggcccgtgttattgttaagcattagcctctagccctctaggtaggttgttatgccagtacatgcacttaaagtattgcttgttcctgtggattcggctattttttctacctagcatgatggaatgatgattggtaattccgttattgggtaagcaatcgtacagtctgcgtcggatcacttgaacagaaaaaatcatagctacagtaattattgtgtttagtctattttgtggttatattggcgctttcatgatggaactctctagaggtttgctagtcaatggaactctgtagatgttttctagtcaatttgtctgtcttcaactcttcatgtatactcttgttgattcatgttgaactcctgtaccatttctctgggcgaagtagctggaccgacatcaactgttggtagggtgaatattttattaatgtatcattcatgagtgttgggtgtgttagcttggagttccgctctgggagcctataaattttaatgaccttttctctgggctaagtagctggaccggcatcaactgtcagtaggatggatattttattattaatgtaacatgagttggttgtgttagcttggaattccactctgggagcctacaacttctattaaaaggtcaaattaaatattgcgtcgtagctggactgaattctttggccaacaccaaacaaaatggattccatgtcttcatgtatggtgaatataacaaaatggattccatgtcttcatggtgaatatagcagtgctgaactttatgtctcttgaaatttaatccctatatggttgttctgtgttaatataaactatggtgtgcccaagtgaagtatctggtatcatgtcaagatcagttcatgggctagtagagcatggtggtagtatgttgtgaaattgactgaattcaaaatatcacttaactgtggtaacatgaacacatgattgatgattgttaacaaactctagtcacatagaacgcatcacattctgatatcttgagaccttcaagtgttgctgtatctttccaacccatctagtctgattacatttttcatgctgggaatgttgtttgtgtttgtggataattgaatgactcatttgatttacttacaggttttcaagtttgccattcgttgggaggtggcactggatctggcatgggcacccttcttatttccaagatcagggaggagtaccctgacagaatgatgttgaccttctctgtattcccatcaccaaaggtttctgatactgttgtggagccttacaatgctacactttctgttcaccaacttgttgagaatgctgatgaatgtatggtgcttgacaacgaggctctgtatgacatatgcttccgcacactaaagctcgccacccctacctgtaagttaatcctcattaattcttttaaaaacatcgatatccagtagtttgtatcctattgaaagggctggtactgatggcgagttctaatgatgcagttggtgacctgaaccatcttatctctgctaccatgagtggtgtgacatgctgcctgaggttccctggtcagctcaactctgatctgcgcaagcttgccgtgaacctgatcccattccctcgtctccacttcttcatggtcggctttgccccgctgacctctcgcgggtcacagcagtaccgtgcgctcacggtccccgagctgacccagcagatgtgggacgccaagaacatgatgtgcgcagcagacccccgccacggccggtacctgacggcgtcggccatgttccgcgggaagatgagcaccaaggaggtggacgagcagatgctgaacgtgcagaacaagaactcgtcctacttcgtggagtggatccccaacaacgtcaagtcgagcgtgtgcgacatcccgcccaggggcctcaagatggcgggcaccttcgtggggaactccacctccatccaggagatgttccgccgggtgagcgagcagttcactgccatgttcaggcgcaaggccttcctgcactggtacacgggggaagggatggacgagatggagttcaccgaggccgagagcaacatgaacgatctggtcgctgagtatcagcagtaccaggacgccaccgccgacgaggagtacgaggacgaggaggacgaggaagctgtggccgaatagcaatgagctccgtccgtgggtgctctttcccaagggtaggaccgccgcacttgtgtctctgtgaatgagtttgtttttctgtgcttctcgtggtttgcatgattgattacgcttctgttgttgccgttgaggttgcgtctgtgtttcggctgcggccactgtaatgtagccactgtaataggtcgccgtccgtttgtgtttcgcatcctttgggtcaagtagcttacgttacggctttgctctccttgagctggccaactgtaatttctgacgagatactggtagtgagtgattttttttcatctttctgtgaaagcctgtgtcaa

SEQ ID NO: 205 - DNA, 3444 bp, Sorghum bicolor
  source 1..3444: mol_type = genomic DNA
gactctctcttcccacccgagtctcgcccctcttgacacacgctcctcctccaccagtccgccgccgtctccgcgccccgcctcccccaaaccccaccgcctcgccggaaccctagcccctccgtcgccatgagggagatcctccacatccagggcgggcagtgcgggaaccagatcggggccaagttctgggaggtgatctgcgacgagcacggcatcgaccacaccggcaagtacgccggcgactccgacctccagctcgagcgcatcaacgtctactacaacgaggccagcggcggacgctacgtcccgcgcgccgtcctcatggacctcgagccggggaccatggactccgtgcgctcgggccccttcggccagatcttccgccccgacaacttcgtcttcggccaatccggcgccggaaacaactgggccaagggacactacaccgagggcgccgagctcatcgactccgtgctcgatgtcgtgcgcaaggaggccgagaactgcgactgcctacaaggtatgtcttgtctatctgatctatcccactggatctgatggttttccccctttcccctccggggttgtggagacacgagccctcctggatctagggtttatgcgccattgctctttcgctgtgcctgtagatctgaacaatttcgcctagatctaagcggctcgtgacattttcgacgagttgagcggattttctcgtagaattctcgtacctctcactctctcagtgatagctgcggtagacgcctgacagccttagtgatcgattatgatgcatttctcccttgtactgcagggttccaggtctgccactcgctgggaggaggtactggttcaggaatgggcaccctgctcatctccaagatcagggaggagtacccggaccgcatgatgttgacattctctgtcttcccgtcgcccaaggtgtctgatactgtcgtggagccctacaacgccacgctctctgttcaccagctggttgagaacgctgatgagtgcatggtgctcgacaacgaggctctctatgacatctgcttccgcacgctcaagcttgctacaccaacctgtaagtgctgaatgctcttttgcttgacgttacacattgaattttttgcatctgcatcatatcagtttctgttgttgatatttatttggcatgttctagttgatagttaacaatctgtttgcaaattgatgatgcagtgatttatctgtttatgctttgcgccaataacatatattgatataatatatatgtgggttgtaactcacggaagtgttatatgcataggttgttcactgttttgctaacatgtttttattggctatttgctgtcgtagtctagcacatacattctatcttgtatgtctccagtacacattttccattttgtaaatgatcagccacaaaatgacgctgagaagcctggtaataaaaaacatatgggtgataacaggaagtgttatgatatgcatatcacccatttctttttctctggaatgcagcacaagcagacttgttgctcactgtgttttgctagcatgtttattgagtatttgctgtcatagtttggcccatacattctatcttgtatgtctccagtacgcattttccattctgcttgttatatacatgtaaacgatcagctgcaaaacgatgctgaaaaagcttttaatagtaaacatatcggttgtaaccccaagaagtgttatgatatgcatggcactcatttgtttttgtccagaatgcagcataagaaaactagttgttcattgtgttggaaacatgttttttgatacatttgctgtagtgtagcacatgtattatctaccttgtatatttctggtacatttaccattctgctcgttatatagtccatgtaaaatttgtaaatgcaaagctagaagtgttatgatatgcatagcactcattttttcttctgtagtgtagcacattgattatctaccttgtatatttctggtacatttaccattctgcttgttatatacatgtaatttgtaattgcgtagccagaagtgttatgatatgcatagcactcatttcttgccttgggacgctttgaatatactttttactcatgcatagtggttatttgttgttgcagtgtagcagatgcatttttatctgtctgtcttgtactcttgtatatttccagcatatgttttatagattatttgtcaattgttatacatgtgttcattgagctggtaaatcgttcagcttgtatgtaataatttgaagggggctgatgttttttttttacttcaaacttccagtcttctagttgatattattgtcttaaaagcctggagtgatatgccactatcataatatgcttgttatttctgtacagacttgagcatgttcttcaacattgtttttcttatgtgtgcagttggtgatctcaaccacctcatctctgcaaccatgagtggtgttacgtgctgccttcgcttccctggtcagctcaactctgacctccggaagcttgctgtgaacctgatccccttcccgcgtctccacttcttcatggttggatttgctccactgacctcgcggggctcccagcagtaccgtgccctcactgtgccagagctgacccagcagatgtgggactccaagaacatgatgtgtgctgctgaccctcgccacggccgctacctcacagcgtctgctatgttccgtgggaagatgagcaccaaggaagtggatgaacagatgctgaacgttcagaacaagaactcttcctactttgtggagtggatccccaacaatgtgaagtcgagcgtgtgcgacatcccacccattgggctgaagatgtcctcaacattcatcggcaactccacctccatccaggagatgttccgccgcgtcagtgagcagttcacagctatgttcaggaggaaggccttcttgcattggtacactggtgagggcatggatgagatggagttcaccgaggccgagagcaacatgaacgacctggtggctgagtaccagcagtaccaggatgccacggccgaggacgatgaggagtatgaggaggaagaagaggaagagcacgctgactaagccatcctctgcagtgcttggtacagagatgagagatgatatcccttgtatcgctgttagtcagtatgagtcgattgaggtgcgtgtggtggtgatgttaggtactactagatgggtggtattgcttatggatgtgatgttgctgtgacaaaactccatttccttttgtattatggttgtccccaagttgttattaccatgaggtggaaggtagcttaactgattgttgctatgccttatgcatcagttcaagtggtttatgtggtattagagaattctactgtgttaaatgatggtttatcagcagttcgtgtgaagtttttgattga

SEQ ID NO: 206 - DNA, 2871 bp, Solanum lycopersicum
  source 1..2871: mol_type = genomic DNA
tggcattttccccaaaaatcaaattctctctttagctgtaaaccctatactctttctcctacaaaaagtcactccaaagtttatcagcgaaaatgcgtgagattttgcacattcaaggaggtcaatgtggaaaccaaatcggagctaagttctgggaagtaatctgtgccgagcacggtattgattccaccggaaggtatcaaggagacagtgatcttcaattggaacgactgaacgtgtactacaatgaagcaagctgtggaagatttgttccacgcgctgtcctcatggatttggagccgggaactatggatagtgtcagatctggaccttttggtcagattttcaggcctgataacttcgtgtttggccagtcaggtgctggtaacaactgggccaagggacactatactgagggagcggagcttattgactcggtgcttgatgttgtgaggaaggaggctgagaattgtgactgtttacaaggtacttgacaagtctagtagagtcaattcccttgatctaacaatttcactgtttagtttttttctcttctttctggttattaaagttatacatgtttcagtcgttatgttttgtgtatcctctttgatttcttgaatttctggtaggatgagtttttgttaaaagtcatcgcgtttgattcgattttactaaatcaatccgctgattatagtgaacaattgagtgaaatgtcacagaacactctcattttggtggtgttagatattatatatatttgatctctagttgtgcttcaggagtgcattttcttggagtttacagatacagtatctcttcaaatgagcgatttgatgtgaacttaggtttctttgtttgtgcgtatgaagagcaatgagttctagttcaattttttaccaaaacaactttcattcagcaaagaaaatttgtgtctatttggcaaatatgctagtttattgaaaacaattgagttatttggtacttgacaatgtgtcagcttgaatattgtttctcctaatggctatatcatcatggttgctgcaattgcttgaaacctctttgcttggttgatctcttatttttggttcataacaaagtacatgaatgcaatttgaagtttaacaactcaaaccctgcttgaatgagagtcaatgatctaaatttgattagttctgttaccctctaaatgagtaaaacattgggctagctacctttttcttacatcttgtggaagcattttgagctcaatgtaaaataccttttcgacttgttagtaatctgatatattaagcaaatgaatatggattttgttttggtttcaggtttccaggttgctcactctctaggaggtggaactggatcaggaatgggaacactccttatatctaagatcagggaggagtacccagatagaatgatgcttactttctctgtattcccttcccccaaagtttcagacacagttgttgagccctataatgctactctttctgttcaccagcttgttgagaatgcagatgagtgtatggttttggataatgaagctctttatgacatttgcttccgaactctcaaacttactactccgagctgtaagttgcacctcttctcagttagctgttttgttcttactaaatgcaacctgatagttgtgtgatatatattaatgttatgttagttttaacatctattcttgacttagaataattaaactgcaataagctgagggaggatgaggtgacattcttttattcatgtgttgggattgttatatgtatcattgttcagttgattcaactacttattttagaatatttgcaattctttacagtcaatactatgtccaaaaaccttttgattgtgtatgattctgttttatgatcaccatgtatttgtgcttgtccttttttaccctttagttagtttggaaatcacacttagtccttctaaatcggggcatgaaaatgagttctactacatgtatcattatcattaatgtacttgctatgatgaattttgttgatttatttatgattgatgtttgcctcagttggggacctaaaccatttgatttctgccaccatgagtggtgtaacttgctgtctccgtttccctggtcaactcaactctgatctccgcaagcttgctgttaacctcatcccattccctcggttgcatttcttcatggttggatttgctccgctcacttctcgtgggtcgcagcaatatcgagcattgactgttcctgagctaacacagcagatgtgggatgcaaagaatatgatgtgtgctgctgatcctcgtcatggtcgatatttgactgcttcagctatgttccgtggaaagatgagcaccaaggaagtcgatgaacagatgattaatgtgcagaacaagaactcttcctattttgttgagtggatccctaacaatgttaagtcaacagtctgtgacatccctcctactggtctgaagatggcctcaactttcattggtaactccacttcgattcaggagatgttccgtagggtcagtgagcagtttacagctatgttccgaagaaaggctttcttgcattggtacactggagaaggtatggatgagatggagtttaccgaggctgaaagcaacatgaacgatttagtttccgagtaccagcagtatcaagatgcaacagctgaagaggaaggttatgactatgaagatgaggaggatgaacaagtagaatcttaatgatttcagttgctggagagttttgagtgcagttatatagtagtggtgttaagctttctatttttgttttgtggtttggaactttgtgctgtttggccaccttggtggcacaattattgatatctttgcatttatata

SEQ ID NO: 207 - DNA, 2844 bp, Solanum lycopersicum
  source 1..2844: mol_type = genomic DNA
tggcaaccaatcataactacggttaagtttaaactaaccgtggttctcaaccgcaagattttatttcttgggagttgttcacggtataaaaagggcttctcagcacagagaatgtatcagatctgaaaatcttcggaagaggcgtcttgataaacgtcctttcgttttgaatttgaaatttgaagatttctaaataaaaaaagcagcgaaaatgagagaatgcatatcgatccacattggtcaggccggtattcaggtcggaaatgcatgctgggaactttactgccttgagcatggcattcaggtttgtatttttcaccatttctttatcttttcaaacttaaatttctaattgtttttgtatatttgaatttttgtgtagatctgtttgaatatctgaatttacgttcctttgatttaaaatttatttgaatttgtattttatacatagatctatgtgtttcttcaatctgtttgaatgatatataatgttgtgcattgatctcttcaaatgcgaagcgttcttgtatagatctgtttgaattatttgttttgagtcccgttgattttgaaagaacatttgatccacatatatttaggtagatcaatttgctttatgataaatctcttttcaaatgcagatgtaatgatatagatctgtgtgaatgatggtgatatcaaaatgatttgaatgcacatcgtttgagtagtaaaaaacaacatttgatagacgtcacaaacatttgaatccactctttttgatagatatattgatgcataaatctgtttgagtaacatcaatatttgattgaatctgttcaaatgtgaaagtttttacatggatctgtttggataatatgatgtgaaaatgatttgaaagtcgaattttttggatagattcatttcatgtccattagatcggatggatgtccatagtatagatgtatagaaatttatgtgtgtatatgtctacattagatggatcgtcttcaatgctatattaaaactagtgtaccatagagatgggcgcagaactgaataatacatgtatgatttattgtgaatgaatggtagttattatactttgaaatttcattagctaatgtatccaatagttaggttcttttgtgagattctatgacattactcaaattatttggatatatgaaaaacatgttatccattagaattgtatctgttgctaagaacctgttttagaggcattgctgatgatcttgttatttctcccaaaagcctgatggccagatgccaggcgacaagacagttggaggaggtgatgatgccttcaacaccttcttcagtgaaactggagctggaaagcatgttccccgtgctgtctttgtggatcttgagcctactgtcattgatgaagtcaggacaggaacatacaggcagctctttcaccctgagcagctcatcagtggcaaagaagatgcagccaacaactttgcccgtggacattatacaagttaatatttgtaccttattgcagaactctatttggatttgttcagtttgatcaagttcttatatttgtctttttgtattgtttacagttgggaaggagatagttgatctctgcttggatcgtatcaggaagcttgctgataactgtactggtcttcaaggtttcctggttttcaatgctgtaggtggtggaactggttctggtcttgggtcacttctgctggagcgtctctctgtggactatggaaagaaatcaaaacttggtttcaccatttatccatcaccacaggtctcaacctctgtggtggaaccttacaacagtgtcctgtcaacccactcccttcttgagcacactgatgttgcaattcttcttgacaatgaggctatctatgacatctgcaggcgctcattggacattgagcgtcccacatacaccaatcttaaccgtcttatttcacaggtattgtttggtacattacatcatatacaatacgtttgactgcggaagtttctgttgtttgaggtattaatgtttgtgctacctatgcaggttatctcttcacttactgcttctttgaggtttgatggagccctgaatgttgatgtcaatgaattccagaccaaccttgttccctaccccagaattcattttatgctttcatcctatgctcctgtcatttcagctgagaaagcctaccatgagcagctgtcagttgcagagatcaccaacagtgcttttgagccatcttccatgatggtcaagtgtgatcctcgccacggcaagtatatggcttgctgccttatgttccgtggtgatgttgtgccaaaggatgtgaatgctgctgtggctaccatcaagactaagcgcaccatccaatttgttgactggtgccctactggattcaagtgtggtatcaactatcagccaccaactgttgttcctggaggtgatcttgccaaggtgcaaagggctgtatgtatgatttccaactcaaccagtgttgctgaggtcttctcacgcattgaccacaagttcgatctcatgtatgcaaagcgtgcttttgtccactggtatgttggtgagggtatggaagaaggcgagttcagtgaagcacgtgaagatttagctgctttggagaaggattacgaggaggttggtgctgaattggaagaaggagaggatgatgatcacgaggagtactaaacacgggatggctttgtttgttggattgtattttcctttgggtgtttttcaaatgctgcacttagatacatcactgctattttgtattttaatggtgtcttgtttgctgacatgaattcatctgctatgaaaagttaaacgtgcttgtttga

SEQ ID NO: 208 - DNA, 7663 bp, Solanum lycopersicum
  source 1..7663: mol_type = genomic DNA
gagagtgacataatttcgtaagcctcactttttttccctcttttctttttcgaaacctccgttttggctacgccccacaaaaagcgcccaaaaagccaaagtagaagctaattccgattgctctttctctccttctcgcagatccataacttgtgcagtttactcctgatactgctaagcctgaaggaaccaacgagtaagaaagtagaaggaaaatgccgagagaaattatcacattgcaagtgggacaatgcgggaaccagattggaatggagttctggaaacagctatgtctcgagcacggtatcagtaaagaaggcatccttgaagattttgctactcaggtatataacttattatgttcattgtatgcatcagttgaagtagtatacagcgtatataccgaatattaggttttgacttgcgtgttgtgctttaccttagattgtcttttttcagtatatggttggtatacaaatctgtacacacataattgtaggaggagcaatatatgaatagatagtgctgacaattgtgtagaactgttggtttgaatgaagtgatatgaaacaagagatttgtttgtaaaagataataatttccgcacataggttagcgagcaaagtcattttcactgtttcgtgagaagtaaatcccttgaacaaaacattttctattatccaactaaacgaacagataatttcaaaacattttgcctggaacccaatgtgccctaatagtgttatgcggttcaagttcccgccgttcttatggttttacctgttaagatatatgctcatctgaatcctacctttttttcgtcacattttggaaggaaaaaacataggtagcatttaagtagaggttttgtaggttcagcgtctcttttttattttttttgtttattttgaaattaaagctttttgtgacaactttgttttataattggtttaaattgagataattttctgtagtttatttattccagaaggaaattgatttcttttttttctctcgctgtggtggaaaatgaaatgcgaatctaagagaaaaagggctaacattaaattaccattttaaatacagagatacttaggtttgtctgttttgtgttccgcataaaatgcaagaggtgatagatacaagtgacaactcagataaggattattggttagatcatgtagtagtgagttgagacagtttagtcaagttattctatgacaattaagtttaatgactttgaaatctacacaggaagctaaatatcccttcgaattgcataccaaagaagcatcacattctttaagtaaaacatctgtctgttatcatgacgagcctttttttattcaaattatggtccttattggttacaccacaacactacttgttttacttttgaaaagttatgtgtttttttttggaacttgttgtgctgaacttatcatcagttgatagatgtgctgtttctaagaaattaatttgaggagcttgaaactggacggtctccaaattatagatttgattctttcattttatgatctgatttatgctacctagtttccatggatgtttacacatgtacatacaacactatcaatgagccacatgcttgtgaatggttgatgtacaggtcctcatccacttacgcaaaaagttctaatttgtttttacacttgcttgtgtgatttagtgcttgtgttttcatcttaagaccactcttttatacaacatgaataacctacattactttatagtgatgaatatttaatgttgcagggaggtgatagaaaagatgtatttttctatcaagcggatgaccaacactacatacctcgagcattattgatggatctagagcccagagtgattaatggtatacaaaatggtgaatataggaatctctacaatcatgagaacgtattcattgcagatcatggaggaggtgctggaaataattgggcaagcggatatcatcaggtcaatttgttttcttttaaatctctgtatcagtgtattatagaaaaagatcaatcatgtgtaggaacaaatcaatgccataaatgtcctcagctagtttctggactaccatttattaagattgctatattcccaaagatgctccaccaatgttacaggcaatacatgcactatcagtgttattttagtggcctggatgtcaagttggacgaatgagccaagctcataataactgtgacttatcctgactcgtaaaagtatatatccactctttgaccgccgttacagttttgattcaagatattttgattgggataagaaaaccagtagatgtcatcaacttcttcatcaatccacttccaatactattctgtatgttctttctgtgatgttcactcgacttgcacctttgtagagtctttattcagaaaataatcttgaagtgcttcatggacctttcattttgttgtcccgagagctttgattagcagtttctgaataatttggtaaacccatttttctaccagggtaagcaatatgaggaggatctaatggacatgattgacagggaagcagatggaagtgatagtctcgagggttttgttctatgccattcgattgctggtggaactggctcaggttgactccttttattaagttggttcagattgtgataacttcagtagattgagtgtctcggaattcagtgtggatttatattatgttgctgatcactgtcttcagtgcaggtatgggctcatatctgttggagactctgaatgatcgctacagcaaaaaacttgtccaaacctacagtgtctttccaaaccaaaatgagacaagtgatgtggttgtacaaccttacaattccctattgacactcaagcgcctgacattgaatgcggattgtgtagttgtacttgataatactgctctcaatagaattgctgtagaacgcctgcatattacgacccccacctttactcaaacaaattccttggtgtcaactgtaatgtcagcaagtacaactacactacgctacccaggatacatgaacaatgacttggttggactccttgcttctttgatacctacaccaagatgccatttccttatgactggatatacaccactcactgtggaacgtcaagtaagatatctgttcttatctgtcagtgtttttgtaatgttctaaatgttactgtaatggtgactgctgattatctttttacttttgcactctcatagtatctcaattgtctcacaattatttatacaacttaagtgcactaaaaaaaacttagccatacaaggttgctcctcacatgtacaaaatcattattgaacccttcaaagtctctcctattcctctctccacaccacccacataagagcctatggggctgtatcctatcttttggtattctctttcttcgtttgaaagcacaaatatgaatgcatcctttacgatttatagtccattgtatcctaaacaaattctgaacattcccaaagtactagctgacatatgtgattcttttctttctcaaagtctcagctgacaatattgctccatgaattgttgcatagttatttttattttctatagtgggacctgatatcaagagtaatatcactttgttttattgttttttctgatttaaatatcttgccacggtctttgacatcttgttttttgaaccatctaaattgtgtgcttgtggatatcaagatactgaagcagtaagcttttaacttattgggggatgggaaaagaaaacgttgcctgattcatgtgttccccatgaaaaaaacagatctaaaaatatgtaattctaattaatggagagcagtttatcttggtgtaactgattttgtgaagtcattttttcccccactattatacccttatatcttacctgttatcaagaaaaagagaagatgataaattggccatctcacaaataggtagttatttcttcttaattccactagttcattctctatttgtgtataaaaagagaagatgataaattggccatctcacaaataggttagttatttcttaattccactagctcattctctatttgtctattcttttctcttttctgtttcctagtaaaattgtaacatgcagcttgtgtgtggggcattcagtagtgacaactgaagcatattgctaataattttctttttgcaggctaatgtgattaggaaaacgactgtacttgatgtgatgaggaggctccttcaggtctgtaaacctgctctccatattttcctattgaaagcttttgcagatatactcaaggaatttcactttgcagaccaagaatatcatggtttcctcctatgctcgaacaaaggaagccagtcaggctaaatacatatccattttaaacatcatccaaggagaagttgatcccactcaggtattcatgattattgtttaacaacttttacggtataactccttttctttcttcacttgtgctacagaaaggtctgattgtttgaactttgaaatttgattgaaattttgtttcaaactggaaggttttaagcagattctaattctgtctgtttgagaaaggcacaccacatgagtcatgattttggaacttaaacaacttggttttatgttgttatcatgtaatccttaacttgcattatttcccttgaggagttctaagattatttcagttgcaactaagacctagctttatcacccaaccacccaaagggacattgtttttccattttatacatctagattcctttgtagtcatgaatcttggggatctagaatcatattatattgctcatctgttagccgtttcccaactttgtaagctcggagcatatatcaagacaacatatgcacacacataacctcactacttcttactcatttgatgttttgtgaatcaggtccatgaaagcctgcagagaataagggagagaaagcttgttaattttattgagtggggccctgcaagcattcaggcaggtcttttggccataatacattttgagatttagcttttcttatcctacttcttgactttgcattaccttcctttgcaggttgctttgtctagaaagtccccttatgtgcaaactgctcatagggtaagatatacttctactgtgtacttcttcaatcttttgtgctgaaggctgttaatctgagctgtacagcttatgaactgcttaaatgactttcttagagattaaggatgtatagtaatgtaaaagtcaaagcttgatttcgagtaattcagcttaccaacaaatcaagggagtaaaattgtacttggataattgagtttaacaacatgaagtaatcgtttgttctgtgtttcgaaactgatgcttgatccattagatgctgttgctgaatccgaaggttctacatagttcatagtttgagctttaataacagacctattatagcataacttcttaaagttgaagacataacagatattggttacttatgtttgaaaaacacatttcttgtaatgggcaaatatagtctatatttcagttgctgatatataatgagctgaggcaagctagattagtttgactatctggtcttcacgttcagctggaatcactttcctgaatgatgtttggaccttgcaaagctgtttgtttccttaaagatgtgtaatagaactgtgtgttttccaatgtatcaggttagtggtctcatgctggccagccatacaggtatccgccacttattcagcaagtgtttgacccagtatgataaattgagaaagagacaagctttccttgacaattataggaatcacccaacgtttgccgtaagttctgtttcaactctgtctttctgatataggcagctcagtgtatagtttagttattggtaagtcagtcctcattcttcccctggatttggttttgtgtctagcttttctgcttgcatggctaagaaactgataagtaaaacagaatagacatgctctatggtttctgcaaaactgaacctgaaattctttcaagctaaatctgtcaacatctataggaaactatgacatgctttcttcctcagtactgtatttcctttctaaacctgctttgaattgtttcacttgagctgagggtcttctggaaacatcctctttgccttcccaaagtaaggagtaaggtctgtgtacacaccactctccccaaaccccacttgtgggattacattgggtatgttcttgttgtattgttctattactatacaatgctatctatgtctataactgacgtccaatgtaatatttgctgctgatattctatatctaaccaattacataacaaaataatattgtttgccattgtaagaatgtacagtctttagagaacaaaagagaacacttggatatatgaaatgtatttgatgacgcctactaacagcgtagatttactttgtcattaggtaattttcctcaagtaatatatagaggtgtatatgttatggagaaacaagtagttaaattcgaaaagtaaagtgacacttttttcttttcagttggtccgaaaaagaatgacatcttttgatattttgctaaaatttaacttcaagcttcccattttactcttaattgaaatgttttatagccacaaaaacttctatggcttattctataccacaagttttaaaagttctcattttgttactttaattccgtgtccagtcatacaccttcacataaattgggatggaggggagtgagaataaggttttctgaagtacaatactcagaattttgagaatagaacagtgtcctttgtgatattttgacttgtgggcatgaggtgtaaagttgaactttaaatactatgcttctgtgaggagttaaaatccttagctatccctatataggctcaacaatttgaagaaaaaattgcatcagtttgtcaatatcacatatggatgtttgtcctatgtcccgtctgggctttgtagccccagctgagcttcttgcttttcttgttcaacaaggaatgatctatccatgcgggagtccaagaaccctagctttaatctacatgcactttcctgtaaaagcttttgttggtttcatttatagtgtttgctataagctttttcgtctttaatatttacgcataatgggcaggacaatgatctatccgagtttgacgaatctagagatgtgattgaaagtcttgttgatgagtacaaggcttgcgagtccccagattacatcaaatggggaatggaggtaagtgctactgtgctagtactagtatactagctattctgtgttgccagtaatttcatgtgctgcatcaccaatatgggctaatctatttgcgcaggatcccgaccatgctctaacaggcgaaggaagcgctagtggaacgattgatccaaaattatctctatgagcaagtcaactattccctgtttcaactctgcaggaaaaaaaaagactttgttccttgtaattatctctataatttaattagtcttcatgagaactcaatttgggactcaacttatttgttaagagtcatttggttttgtttacattagcaaattcatggtaagatgtgaaattgttctagagaaatctccagcaatgaagtactgtttcatatatattttgagcataacaatcgaaagccattgcaattt

SEQ ID NO: 209 - DNA, 2137 bp, Solanum lycopersicum
  source 1..2137: mol_type = genomic DNA
atgcgtgagattttgcacattcagggaggccaatgtgggaaccagatcggagctaagttctgggaggttgtgtgtgccgagcacggcattgattccaccggaaggtacaaaggggagagtgaccttcaattggagcgcgtcaatgtctactacaacgaggcaagttgtggaaggttcgttccacgcgccgtcctcatggacttggagccgggaaccatggatagcgttagatcaggtccttatggtcagatattccggccggataacttcgtctttggtcagtctggtgctggtaataactgggccaaaggacactatactgaaggagcggaacttatcgactcggttatggatgttgtaaggaaggaggctgagaacagtgattgcttacaaggtaatttggctgttgcttttcgtgcagtgcttttcgattctataacagaacttattttgtaacgtgtggttactcggacggtgatcggactgtgtatgtacttgtgcacggtagcaaagtcacgaattttgttaacgaagtatgtttaactgattatccagtgtgttgtatgtatgtccaacttaagcaggaaatcatgtttacgtcgtaacaacaatccaattttatgtttagatgtttgaagactgatgtattcatcccctgttagaacaaatttttgttaggcttctaagagagaaatgaagtttgtgcttgctataattttgttgattatgtgcagcaaatggcttgaatccaagtaaattgtctgtttctttgatgagcttatgaatgtggactctgtttttgatttcaggttttcaggtttgtcactctttgggaggtggaactggatcaggaatgggaactctcctcatatctaagatcagagaagagtacccagacagaatgatgcttactttctctgtgttcccttccccaaaagtttctgacactgttgttgagccctataatgctactctctctgttcaccagcttgttgagaatgcagatgagtgcatggttttagacaatgaagctctttatgacatttgcttccgaactctcaaactaactacaccaagctgtaagtcgtcttcttgcttagcaatagttttttttggtgaaactttacaattgtgattgtactggtgttaagattctgtaggatttgccctttttatatgattgtattatgctagtatatgtagattaatgtactaactcgtgatgtttgcctcagttggagatcttaatcatttgatttctgccactatgagtggtgtgacttgctgtctccggttccctggtcagctcaattctgatctccgcaagcttgctgtcaacctcatcccatttcctcggctgcatttcttcatggttggatttgctcctctcacttctcgtgggtcacagcaatacagagccctgaccgttcctgagctcactcaacagatgtgggattcaaagaacatgatgtgtgctgctgatcctcgtcatggtcgttatttgactgcttcagccatgttccgggggaaaatgagcaccaaggaagttgatgagcaaatgattaatgtgcagaacaagaactcttcctattttgtggagtggattcctaacaatgtgaagtctactgtctgtgacatccctccaactggactgaagatggcctcaacttttattggcaattccacctcaattcaggagatgttccgtagggtcagtgagcagtttacagcaatgtttcgaagaaaggctttcttgcactggtacactggagaaggtatggatgagatggagtttacagaggctgaaagcaacatgaacgatctagtttctgagtaccaacaatatcaagatgcatcagctgaggaggaaggttatgactacgaagatgaagaaggtcaagaagcttaagtaatgcagctggtgagaattttgtccatcccactgtttattcttttaaatgttgttttagggtttggatatttgttttgcgtgtgagatagtcgtgggacagtttgcacaagcccatgtagttatacttggtgttgcatcacatacctatcactgtaatctagctcattgaattctattagtaccaatattttgtgacaagggaattgtggctcgcttcaaaaacaa

SEQ ID NO: 210 - DNA, 1940 bp, Solanum lycopersicum
  source 1..1940: mol_type = genomic DNA
aaaaaatcaacgtcagtgtgaagtcctggtccagctggtctccttaattttcaaatttcaaaatttgttcatctgagccttaaattcactatattacaaaccctaaaacgctttactgtattttttcttctcatttcatttgtattccagatttactcattttaatttctgcatattttgttgagatttgagtttgaaaatgcgtgaaatccttcatattcaaggtggacaatgcggtaaccaaattggtgccaagttttgggaagttgtttgtgcggaacacggcattgattctaccggacgttacagcggtgattctgatctccagcttgagagaattaatgtctattacaatgaggctacctgtggaaggtttgttcctagggctgttcttatggatctggagcctggtaccatggacagtattagatctggtccttatggacagatcttccgtcctgataactttgtttttggacaatctggtgctggtaacaattgggccaagggacattacaccgaaggtgctgaattgattgatgccgttctcgatgttgttcgtaaggaagctgagaactgtgactgccttcaaggtttgtgtttaggcatttttgtttttgtacatctgtgcatttttttttgacgttttctgtgtttaattttcaggatttcaagtgtgccattcattgggtggaggaacgggatctggtatgggtacgcttttgatctcaaagatcagagaagaatacccagacagaatgatgcttaccttctccgttttcccttcacctaaggtttctgatactgttgttgagccttataatgctaccttgtctgtgcatcaattggttgaaaatgctgatgagtgcatggttctcgacaacgaggctctatacgatatctgcttcagaaccctaaagcttaccaccccaagctgtaagtcattgtttgcgctctcatctgtttgatttttgtatagttagttgttgtcagttcttttcgggttcacatggaatcatctgtttttaatctcatggaacagttggagatctaaatcatctgatatcagctacaatgtctggtgtcacctgttgcttgcgtttccctggacagttgaactctgatcttaggaagttagctgtgaatctgattccattccctaggctccatttcttcatggttggttttgcaccactgacttcacgtggttctcagcaatacagggctttgacagtgccagagcttacacagcaaatgtgggatgccaagaacatgatgtgcgcagctgacccacgtcatggaagatacttgactgcctctgctatgttcaggggtaagatgagcacgaaagaagtggatgaacagatgctcaatgtgcaaaacaagaactcttcctactttgttgaatggattccaaacaatgtcaagtcaactgtttgtgatatcccaccaaccgggcttaaaatggcatctaccttcattgggaactcaacatctattcaagagatgtttaggcgtgtgagcgagcagttcactgctatgtttaggagaaaagctttcttgcattggtacactggggaaggaatggacgagatggagttcactgaggcagagagtaacatgaatgatctggtatctgaatatcagcagtaccaggacgccactgctgatgatgagggagaatattacgaggaggaagatgaagaggatgtcaatgagaattaaaccccaacttcctgttgatgttctttcggcaattgcaatgtaatgtaatgtgtcttgatagcgagtgctatcctgtaatattttttgttgttgttacttaattattctggtgttttgtgactattaagtttctattgctatttagagtaggctctctgtattgccttttactactagtattattttgttctatttcatctcttcttgtttattta

SEQ ID NO: 211 - DNA, 2991 bp, Solanum lycopersicum
  source 1..2991: mol_type = genomic DNA
taatcaaaatctcacaattcgaaatttcgaaactttcaatttctccttttattgtttatagaaacggcgtcttgataaacgccgttcttctcttcttcttcttcgtttgaattttagggtttcgaatttttcagtttctgtatcgaaaatgagggagtgcatttcaatccacattggtcaggccggtattcaggtcggaaatgcttgctgggaactttactgcctcgagcacggcattcaggtataattttctatttttttttgaatttttatcggatttcgttggaaatgtgaagtatattccggatctggttgattaatttgtttttaggttatgtgtgtttagattgaaggaacatgtgcattttaggtagatctgattgattatttacgattatgtgagtgtttttcagtagatctgatagaatgtagactgtccgattgatatcaaatgtgagaaaaatgctacagttctggttgatgatttatgactggtaatgtatgtgttttcagtagatctggtagattatttgggatatagattggatagctgtccggctgaattcaaatgtgaaaaaatgctgtagatctggtgaagtactgtagatctaggtttggtaactgtccggttgattaaaaatgtgatagatctgattgacatatagtatctaaaggttgcctggtgtagaaatgaacttttttaaaatagatctgtagggatatacggtggttagatctgtagtgtgatttaaaatttggaactattttggtagatctgattgaattatttaatggttgaaatcatatgaatccgattgttaaataatttgtttggaacttgttgatgtttaggttagatctgtagtgtgatttaaaatgtggaactattttggtagatctgattgaattattcaatggttgaaatcatatgaatcagattattaaataatttgtttggtcctggaatgttctaatgagatatgttattgtatcaattcagtttatatgcctgtgttgtactttagattgagtgggttctgatgttggatatattatatccttggttaaatctgtagatgtatgattgtgaatgttcacatgattaattttgaagtaggtgtatatttgtattatattttatttggcgtctcttgtgtttgagctgatgtatgatgctccattggtgttccttggttatatttctatgtgttgatggcttatcctgggaactttctttttccaacttgtcatccttggaaactagtttggtttattgtgttctgtaacgagctttaattgtttcctcgtggtttaaattttatggatctgcagcagcttgttgtgatttgctaatattctttcttctgttttccaaagcctgatggccagatgccaggtgacaaaactgttggagggggtgatgatgcattcaacaccttcttcagtgaaactggagctggaaagcatgttcctagagctgtctttgtagatcttgagcccactgtcattgatgaagtgaggacaggaacttaccgtcagctctttcaccctgaacaactcataagtggcaaagaagatgcagccaacaactttgctcgtggccactataccagtaagctaacctcctcaccaactcttactcaaatcatttggttttaaaagctgatagttttctttttgtctccttgtagttgggaaagagatagttgatctctgcttggatcgcatccgaaagcttgcagacaactgtactggtcttcaggggttccttgtctttaatgctgttggtggtggtaccggttcaggtcttgggtcacttctgctggagcgtctctcagttgactatggaaagaaatccaaacttggtttcacaatttatccctcaccacaggtctcaacttctgttgttgagccttacaacagtgtcctgtcaactcattctctacttgagcacactgatgtgtcaatccttttggacaatgaagccatctatgacatttgcaggcgctcattggacattgagcgccctacctacaccaatctcaatcgccttatctcacaggtaatgtagaaatctatattggtttttggaatcaattagctccaattagctggtactaatgttttgcacctgtgcaggttatatcttctctgacagcttctttgaggtttgatggagctctgaatgttgatgtgaatgaattccagaccaatcttgtcccctatcccaggatccattttatgctttcctcatatgcccccgtcatttctgctgagaaggcctaccatgagcagctttcagttgcagaaatcactaacagtgcctttgagccatcttctatgatggttaagtgtgaccctcgtcatggcaagtacatggcttgctgtctcatgttccgtggtgatgtggtgccaaaggatgttaatgctgctgtggccaccatcaagactaagcgcaccatccaattcgttgactggtgtcccacaggattcaagtgtggtatcaactatcagccaccaactgttgttcctggtggtgaccttgctaaggtacagagggctgtgtgcatgatctccaactcaacaagtgttgctgaggtcttctcacgcattgaccacaagtttgatctgatgtacgccaagcgtgcttttgtgcattggtatgtcggtgagggtatggaggaaggtgaattcagtgaagcacgtgaagatcttgctgccctcgagaaggattatgaggaggttggtgctgaaggtgatgatgaagcagatggtgaagatgatgaggagtactaagccatgatgtaggctgtaaaatgccggtctgtttttattttcttcagtgtctttatgttgcactagtaaaaacttttatgtgggttgaattctgttggtgttaaaacatgtgtttgcacttcgtgctatcttcttggttatgctgtacttttctttgtacgacttctcatggtattttttctacatttcgttgaa

SEQ ID NO: 212 - DNA, 2648 bp, Solanum lycopersicum
  source 1..2648: mol_type = genomic DNA
ctctttcccatttctcccttcatcttcatcttcatcttcatctcttcttcttcttattctctcattcctctcatcaatttttttcatcaaaaaaactaagagaaaatgagagaaattcttcacattcaaggaggacaatgtggaaaccaaatcggttccaaattctgggaagttatctgtgatgaacacggtgttgatcctaccggacgttacaaaggaaccgccgctgagtccgatcttcagcttgaacgtatcaatgtttatttcaatgaagcttctggtggacgttatgttcctagggcggttttgatggatctagagcctggtacgatggatagtatcagatctggtccctatggacagatcttccgtcctgataactttgtctttggacagtctggtgctggtaataactgggccaaaggtcattatactgaaggcgctgagttgattgatgctgttctagatgttgttcgtaaagaagcggagaattgtgattgcttgcaaggttttgttcatttcctctatgaatgtgcctgttgcctttagtttctgttttcgtttttattgcggattgcttgcttattcttccgattggtagttcacactgcatatattagatctctttcttattgtcattccaaaatcctatgctaatttgcccgatgtatgagttcatagttgacagtgcctttagtttctgttttcgattttattgctaattgcgtactgattcttcctattggtagttaacaagtgccaatactagatctcttcctcattttcatttcaaatcctatgctaattggtccgatgtatgtgcttatagtcgatataacctagatgtaaccgaatttgatcttgttttattttgtttaatgcttgtttgttgtttctatgaatgtacctatggtagcacagttggtcatatacaggtctcttttactcattcgtaatcgtatgctctatgatgaaaatgcctatatttgctgttaacaacttgtctgactcagggtagaaataatgctgatgcatatgtgcacatttgaatgttcatataaagcctgaatctcatagagcacacacatgagtggcataaaattgtatagtctagcagaaggataaatttaactttctcatcatgcatctcacaagaattcatactctcttagagtgcatgatcgagtactgagatttatgatgtgtctggatcttacttatggtaatactagtcaatcgtcgtgtgtttcttttccttatactcttggaaatttatctaagatcttatttatattgtttctgtcttgaaatttctggacagtgatattatctaattgaatacttttatgtctaatgcatctatttgtgaccctctttatacacaattattaccatttgttgattgaggggtggtagttgattgttttgtattctttgttttatggatcaggattccaggtttgccactcacttggtggagggactggatctggcatgggaacactactgatttccaaggtaagggaggagtatccagacaggatgatgctcacattctctgttttcccttctccaaaggtgtctgacactgttgtagaaccatacaatgctacactgtcggtgcaccaattggtggagaatgccgatgaatgtatggtccttgacaacgaagctctatatgatatttgtttcagaactttgaagctcactactccaagttgtaagtgtttctctttagtggtaaccaataatatgatctgcaagtttaagtaagcaaatgattaattttgcctattttctcgtgtagttggtgacttgaaccatttgatctctgcaaccatgagtggtgttacttgctgtttgagattccctggtcagctgaactcagacctgaggaaattggctgtgaatttaattcccttcccacgtcttcacttcttcatggtgggatttgccccactaacctctcgtggatcacagcaatacatatcgctaacagtgccagagcttactcaacaaatgtgggatgccaagaacatgatgtgcgcggcagatccccgtcatggacgttacctgacagcttctgccatgtttaggggtaagatgagcacaaaggaggtagatgaacagatgatcaatgtgcagaacaagaactcgtcctactttgttgaatggatccctaacaatgtcaagtctagtgtgtgtgatatcccaccaactgggctgaagatggcatccacgtttgttggaaattcaacctccattcaggagatgtttagaagggtgagtgagcagtttactgccatgttcaggcgcaaggctttcttgcattggtacacaggtgaaggaatggatgaaatggagttcactgaagccgagagcaacatgaatgatttggttgcagaatatcaacaataccaggatgctacagcagatgatgaggaagagtatgatgatgatgaggttgctgatgatcaataccaatcctaaaaacttctctacatttgatatattgttggtttgttcaatttctgccaagtgaacttgttatgtttcctattgtcttctcttcatttgaactttgtgtttggtttgttgagaaatgaaatgtcttttattggtctatatgaatatactgtattacagta

SEQ ID NO: 213 - DNA, 2294 bp, Solanum lycopersicum
  source 1..2294: mol_type = genomic DNA
aaataaaaaccaaaggtaatatgaatttgtttcaatatacacagaaatatttttttccaaaaaaacccaatggtgtgtgtccctccatttatttatgatgtctccgtagaatccgagaaggggaggagcggagcagagcagagcaaagcattccaattctggagatcgtcggaagtcttcataaagggcttcctcattgattctgcaaaaaaaacatatcattaaaaaaagagaaagatgagggaatgcatatccgttcacattggtcaggccggtattcaggtcggcaatgcttgctgggaactttattgcctcgaacatggcatccaggtcatctccttttcttttatgttttcttgaatgatgttaataatatacatctttcatctggtgtacgtcgagaagaaactaatttcaataaaataaaaaaaattcattttttcatacccaattaactcatgattgagtatttgttcttaatgaaaattgggtaactgtggaactaatcggttcttgtctttccatatcttcaagaaatgagtgaattataccgtcaattagttttttctcattccataatgtatcctgaattatttgtgtgttcaatagccggacggtcagatgccaggagacaagactcttggaggaggtgatgatgccttcaatacatttttcagcgaaaccggctcagggaagcacgttcctcgtgctgtttttgttgatcttgagcccactgttattgatgaagtgagagctggaccatatcgccagttatttcaccctgaacaattgattagtggcaaagaagatgcagcaaacaacttcgcacgaggacactatacaagtacacatcctgcacctaattcaattctacccttattttgaacttatgatataactcttgatggttgagtctctatttttgtttttctttaccagttggaagggagatcgttgatctttgcttggatcgaatcagaaagcttgcagacaactgcactggtctgcagggttttttggtctttaatgctgttggtggaggcactggttctggcttaggttcacttttattagaacgtttgtcggtggactatggtaaaaaatccaagcttgggtttactgtgtatccctctcctcaggtttcaacctctgtggtggagccatacaatagtgttctgtcaacccactccctattggaacacacagacgttgctgtcttgcttgataatgaagccatttatgacatttgtcgtcgatcccttgacattgaacgccccacctataccaacttgaaccgattggtgtcacaggtattggcacatttacaactcctccattctgtaatgaaggtattgtctgcttggggtccaacttttgtggccagagcagacaataccttgtcagttgaaccgtttgaatccttgtatttctcttatcaatgtaatgagttttctaacttctaatcaggtgatctcatctctcactgcttctttgaggtttgatggagctttgaatgttgatgtgaatgaattccagactaacctggttccatacccaaggatccacttcatgctttcgtcttatgctccggttatatctgctgagaaggctcaccacgaacaacattctgtggcagaaatcaccacaactgcttttgaaccagcttctatgatggccaaatgtgatcctcgtcgtggcaagtacatggcatgctgcctaatgtatcgaggggatgtggttcctaaggatgtgaatgctgctgtatccataatcaaaaccaaacgtagtattcaatttgttgattggtgtccaacaggttttaaatgtggcatcaactatcaaacaccaaccgttgtccccggaggtgatttggccaaggtacagagagcagtgtgtatgatatccaattccactagtgtcgctgaggttttctccagaatcgaccacaaatttgatctaatgtacgcgaaaagagcatttgttcattggtatgtgggtgaaggcatggaggaaggtgaattttctgaagcccgtgaagatttagctgcgcttgagaaagattatgaggaggtgggtgctgagtatgggcaaggtgaagagggtagtgaaggagaagaatactgatttatgagtaagagtttgacgggtcattatatgttctttttcccatacacttaattagcactagcaaaatatttgtaaaaacagatctccattttatacatgtacatgctaaatttgattgtctgataactatacaatgtataataatacatgatttttttttcccgaaa

SEQ ID NO: 214 - DNA, 1887 bp, Solanum lycopersicum
  source 1..1887: mol_type = genomic DNA
tgcaaaccctagctccttattcaatttactcttgtcataaatttcatccattttcataaattttcgagttcggtttctgcaattttcttacctaagaaaatgagagagtgcatctccatccacattggccaggccggaatccaggtcggaaacgcctgctgggagctctactgcctcgaacacggtatcaaggttggtccccttattactctacttcaatcgatgtagtcttatttgaaaaaaatttttagttaatttttgtattgaccggcttgtgtttgataatttgtctagcctgatggacaaatgcccggagacgtcactgttggaggaggagatgatgctttcaacacctttttcagtgaaacgggtgctggaaagcatgtacctcgtgctgtttttgtagatctggaacctactgttattgatgaggtgaggaccggaacttaccgtcagttgttccaccctgaacagctcattagcggcaaagaagatgctgctaacaactttgccagaggacattatacaagtaagactcgatccctaacttttttcatctttacatataggagttatatttgttcatttcgtttttgtttatttgttaattttggtgacagttgggaaggaaattgtggatctgtgtcttgatagaataaggaagttagctgacaactgcactgggcttcaaggatttttggtgttccatgctgttggtgggggtactggttcagggctcggttctctgcttcttgagaggctttctgttgactacggaaagaaatccaagcttggattcaccatttacccttcacctcaggtctctactgctgtagttgagccttacaactctgtgctctcaacacactcgcttcttgagcacactgatgttgctatccttttggataatgaagccatttatgacatctgccgtaaatctctcgacattgaaagacctacttacaccaatcttaacaggcttatttctcaggtattttatttgtagcatcacactgttttcctattttgaaatgatttgtttgatatatttatgagatggactaaaaaattggttgattctgtaggttatctcatcgctgacagcttctctgcgtttcgatggtgctttgaatgtggatgtaaatgagttccaaactaacttggttccatacccaaggattcatttcatgctttcctcatatgcgcctgtgatctctgctgagaaggcctaccatgagcaactttctgttgctgaaattactaatactgcatttgagccatcgtctatgatggtcaagtgtgacccacgccatgggaaatacatggcctgctgcttgatgtacagaggtgatgttgtgcccaaggatgtgaacgctgcggtagccacaattaagactaagaggaccattcagtttgtggactggtgccctactgggttcaaatgtggtatcaattaccagccaccaactgttgtccctggtggagacttagccaaggtgcagagggctgtttgtatgatttcaaactcgactagtgttgctgaggtcttctcaagaattgaccacaagtttgatttgatgtacgcgaagagggcttttgttcactggtatgtgggtgaaggtatggaggaaggagagttctctgaggctagagaagatttggctgcgcttgaaaaggactatgaggaagttggatgtgagtctggtgacggtgaagatgatgaaaatgaagagtattaggttcatttctccatgtattttgcttggatgattatgtagccaatggtctcattggtacctaaaattagaagtggttcatattcagtaggttcatgtatttgatttaactttcttctgaaaacttactttgctattttcaacttcttaa

SEQ ID NO: 215 - DNA, 2829 bp, Solanum lycopersicum
  source 1..2829: mol_type = genomic DNA
gattttcaatttacattgagcaaatacatttggtgctaattttaattaatctaactactccatctatcacaatttatgtaatattaaacactatcaacatgtcatgtatattgaatcctacttataaagtcctcgaaacaaaaatatcttttgtgaacattacaaattcttttcgtatttcataaaattgtatattcaattaaactaaaacacgtagatatatatattagtaacggacggcacatctcaagagaaaaagtcacaaatggcaaagtttggtcatgagaggccacacacaaaatatcgattgttatatttcaacaggacggacacttcttaaccgttggatcaaaccaatgaaaacttgatcattatttgtatataaggtcctgaatatctatcgattcaaattactaaaaatttgtgtgaaaaaaaataaattgaaaatgcgtgagattcttcatattcaagcaggacaatgtgggaatcaaatcggatcaaaattctgggaagttgtatgtgacgaacacgggattgatccaactggaaaatactgtggagattcagaattgcagcttgaaagagttaatgtttattacaatgaaactgggaatggacgttacgtgccacgggcagttctcatggaccttgaacctggtactatggacagcatcaaatcaggtccatttggtcagatttttcgccctgataactatgttttcggacaatctggtgctggaaataattgggcgaaaggacattatactgagggtgctgaacttattgactctgttcttgatgttgttcgaaaagaagctgaaaactccgattgcttacaaggttaatgaagcaactatttgatccttcatatccttattgttaactctcatactcaaaagtaaatttgaacttgttctcttagaaaaaaaatctacttttgttatttttatgataacacgagaaatgtgaatacaggatttcaggtgtgtcactcacttggaggagggacaggatcaggaatggggacactgttgatatcaaagatcagagaagaatatccagacagaatgatgcttaccttctctgttttcccatctccaaaagtctcagacacagtggttgagccttacaatgctacactttctgtccatcaacttgttgaaaatgctgatgagtgtatggttcttgataatgaagctctctatgacatctgcttcaggactctcaaactatccacaccaagttgtaagaacatgattaatatccggtcattgaactttattcactatagtaaagtcacaaaaactatatttaagtaacttaatttacaacaaagtctatctatcaaggtgacttctagtgggagcatcggattgccttattttctttctggttatagtgaggacagttcagttattttagtatgaaacaagataattttgtgactttactgttacagaagagaatagtcggttctaattcatctgttttgttgttgtgatcagttggagacctgaatcacctgatttcagcaacaatgagtggtgtgacatgttgcttgcgattccctggccagctgaattctgatcttcgaaaactagctgtgaacttaatccctttcccaaggcttcatttttttatggttggattcgcgcctctaacatcaagaggatctcagcaatatcgagcacttacagtccctgaactgacgcaacaaatgtgggattccaagaacatgatgtgtgctgctgatccaagacacggccgttacctcacagcatcagcattgtttagaggcaaaatgagcacaaaagaagttgatgagcaaatgatgaatgtgcagaacaagaactcttcctattttgtggaatggattccgaacaatgtcaaatccagtgtttgtgacataccacctagagggctttcgatatcttcaacatttattgggaattcaacttcaattcaagaaatgtttaggagagtgagtgagcagttcactgcaatgtttaggagaaaggcatttttgcattggtacactggagaagggatggatgaaatggaatttactgaagcagagagtaatatgaatgatcttgtggcagagtatcagcagtatcaagatgccacagctgaagaaaacagtgattatgaagatgaaactggagaagattaaaggtgttcgaccaatctgctattacgtatgttacgtgctgctgtgaacctgaaactccactagatttatgttttctctactatatttgtactgtgtttatgcatttctgatactgtgaacctcttacctatttactacttttgttcattcaaaaggtgttaatggcaagaacacaatgtattgtatccttgtcatgactttgtaccttaaaggattctactctagtgagtagaatttgatcgcaaaatttacctgatatatgttgaagacacttcttaagtttgtgtgctcgcatatgttaattcaaaacaaatagtgagtacacaactttctgcaaagaatttccttctaaatgaattggatcatgtcacatgataattacttctccatcctccctttagtgtcaaagaaaggggtgcttgcaacactatcaatagctttaatctaacaatgaaaagtaactttgtaagataataagtattagttgaatgatcagcaggcacgcatagagaaagctgacaattcccaactcgcacaacactagttaaacatggtgtgacagaacaaatgcacaacacatgatgaaatatgaaactcataaagaatgcgacgtgcatcaaaatctaaaggaataatgacagcaaatgaagaacaaa

SEQ ID NO: 216 - DNA, 2688 bp, Solanum lycopersicum
  source 1..2688: mol_type = genomic DNA
atgagagaaatcttacacattcaaggaggccaatgcgggaaccaaatcggttcaaaattctgggaagtaatttgtgatgaacacggcatagatccaacgggacgttacaattctgataatgcaggtgcatctgatctacaacttgaacggattaatgtgtatttcaatgaagctactgctggtcgttttgtacctagagctgttcttatggatctcgaacctggtactatggatagtattagatctggtccttatggacaaatttttcgccctgataattttgtttttggacaatctggtgctggaaataattgggcaaaaggacattatacagaaggcgctgaattgattgattctgttctcgatgttgttcgtaaagaggctgagtactgtgactgcatgcaaggtatgaaaaaaaaaataattcaattttgcttctaaaatttagatattctaaaactatgcgaaaaatgttataagttgcaattcttctcgtatttgatgaaatcatgtgttcaagtaaaagttttgatggataaataaataatgaaataattgaagtgtgtgtgaactgtttgatgttaatcacctcaatcgacaatgatagctatatgctctggtgttgtgattaatggatggagtttgttcgtatgatgcctgaatgaacgcatgcaaacgtataaagtagtatttgtctctgttaatgtacatttgtagatgtatagtatttgataagatatgtagtttatggaaatataagaagcattttggacaaaacatatggagaaattgtggatagacaagttcatatataatttgatctataatgcaccttcgtggtgagacacgtataaaagaagagctgggattatgatatatgatgtactttcatcttttttcagtaaatgatttgaattaacattgaaaagttggattcgatcaccttgttttttgttctgttgaaattaatcaaggatcttactgcctagtgtcttttctcaaaacttatagtacaaatcagaatgttatataaaaaaaaaatcgtacaatgatccatgattttttggagatacgaacgcctaagctttgtagaacgagaatttctcacaaatgctttagtcttttctgaatttttgaacataaatgaattttatctatattttaaattggacctctgttttagtttattttatttatttacaatctttgttttttgttttatgagccaggatttcaggtttgtcactcacttggaggagggactggttccggcatgggaactctcttaatttcaaagataagggaagagtatccagatcgaatgatgctcaccttctctgtttttccatctccaaaggtttcagacactgttgtcgaaccatacaatgctacactttctgtgcaccaattagtagagaacgctgatgaatgtatggtcctcgacaatgaagccctctacgacatctgttttaggactctaaagctcactaatccaacttgtaagtttctctctttgatattaactcatacgatcatactcttttcattttagaacgttccaaatgtgtcgcatcattcctaaaataacggagtgttattacatttaaccttctacctcgaactttattataaaaagggcaattactaattctaaatcctgatgtaaaaacattgagtttagtcaagcaacgttgtataaattgatagtttgatacgaatggagtatcctttttgtttgcagttggtgacctaaatcatttgatatctgcaacaatgagtggtgttacatgttgtctgcgatttcccggtcagctgaactcagacttgagaaaattggctgtgaatctaatcccgttcccacgtcttcatttcttcatggtgggattcgcaccactgacatctcgtggatcacagcaatacagttccctcacagttccagagcttacacaacaaatgtgggatgctaagaatatgatgtgtgcagctgaccctcgtcatggacgttacttaacagcatctgctatgtttaggggaaaaatgagtactaaagaagtcgatgaacagatgatcaacgtccaaaacaagaactcgtcgtactttgttgagtggatccctaacaatgtgaagtctagtgtgtgtgacattccaccaactgggctaaaaatggcatctacatttattgggaactcgacgtccattcaagaaatgtttaggagagtgagtgagcagttcacggccatgtatagacgaaaggcgtttttgcattggtatactggggaaggaatggatgaaatggaatttactgaagctgagagtaatatgaatgatttggttgcagaatatcaacagtatcaagatgctactgctgaggttgaggaagattttgatgaaggtgttgaagaacattatgaaggccaataacttctcaaattttagtatcacagaatattgctttgtttattttttgtttgtggatttgttaaatgcttatgttttttttttttttagatttattattgttatttggatgaaccctctgttttatttgttcttttgtgaatgaaaattaaatgttagatagtgatttgaatatgtaaagggaaaagggttaaaaaaaaatgtctgtatacgtgaaatgaatagaattgtcctgtgtagtttgattcaaaaatgtagttgccgttaata

SEQ ID NO: 217 - DNA, 1883 bp, Solanum tuberosum
  source 1..1883: mol_type = genomic DNA
cccatttcttacaaaccctagctccttattcaattcactcttgtcattaattttcatccatcttcactacttttctagttcgattttctgcaatttcttacataataaaatgagagagtgcatctccatccacattggtcaggccggaatccaggtcggaaacgcctgttgggagctttactgcctcgaacacggtatcaaggtttgtccccttatctccctacttcaatagatgtagttctatttggaatttttgtattgaccgacttgtgtttgataatttgtctagcctgatggacaaatgcccggagacgtcactgttggaggaggagatgatgctttcaacacttttttcagtgaaacgggtgctggaaagcatgtacctcgtgctgtctttgtagatctggaacctactgttattgatgaggtgaggaccggaacttaccgtcaattgttccaccctgaacagctcatcagcggcaaagaagatgctgctaacaactttgccagaggacattatacaagtaagactcgaaaccctaactttcatgaagaggaagtttcatttgttcatttcgtttttgttttatatgttgtttattggttaattttggtgacagttggaaaggagattgtggatctgtgtcttgatagaataaggaagttagctgacaactgcactgggcttcagggatttttggtgttccatgctgttggtggagggactggttcagggcttggttctctacttcttgagaggctttctgttgactacggaaagaaatccaagcttggattcaccatttacccttcacctcaggtctctactgctgtagttgagccttacaactctgtgctctcaacacactcgcttcttgagcacactgatgttgctatccttttggataatgaagccatttatgacatttgccgtaaatctctcgacattgaaagacctacttacaccaatcttaacaggcttatttctcaggtattgtatttttagcatctcactgtttcctattttgaaatgttttgtttgatttaagagatgggctaatcaattgttcgattctgtaggttatctcatcgctgacagcttctctgcgtttcgatggtgctttgaatgtggatgtaaatgagttccaaactaacttggttccatacccaaggattcatttcatgctttcttcatatgcgcctgtgatctctgctgagaaggcctaccatgaacaactttctgttgctgaaattactaacactgcttttgagccatcgtctatgatggtcaagtgtgacccacgccatgggaaatacatggcctgctgtttgatgtacagaggtgatgttgtgcccaaggatgtgaacgctgctgtagccacaattaagactaagaggaccattcagtttgtggactggtgcccaactgggttcaaatgtggtatcaattaccagccaccaactgttgtccctggtggagacttagccaaggtgcagagagctgtttgtatgatttcaaattccactagtgttgctgaggtcttctcaagaattgaccacaagttcgatttgatgtacgcaaagagggcttttgttcactggtatgtgggtgaaggtatggaggaaggagagttctctgaggctagagaagatttggctgcgcttgagaaggactatgaggaagttggatgtgagtctggtgatggtgaagatgatgaaaatgaagagtattaggtttatttctccatgttttgcttggatgattatgtagccaatggtctcattggtacctaaaattagaagtggttcatattcagtatttgatttaactttcttctgaatatgtagttttctattttcaacttcttaatctctctgtctta

SEQ ID NO: 218 - DNA, 2529 bp, Solanum tuberosum
  source 1..2529: mol_type = genomic DNA
cacgaaatgagagaaatcttacacattcaaggagggcaatgcgggaaccaaatcggttcaaaattctgggaagttatatgtgatgaacacggcattgatccaacgggacgttacaatgctggtaatgcaggtgcatctgatctacaacttgaacggattaatgtgtatttcaatgaagctactgctggtcgttttgtacctagagctgttcttatggatctcgaacccggtactatggatagtattagatctggcccttctggacaaatttttcgccctgataattttgtttttggacaatctggtgctggaaataattgggctaaaggacattatactgaaggcgctgagttgattgattctgttctcgatgttgttcgtaaagaagctgagtattgtgactgcatgcaaggtttgcaatattatttttttgcttccaaagtttagatattcgaaaactatgtgaaaaatgttgcaattcttctcatatttggtaaaatcatgtagtttaatatcgaaaagtgaaatgtgtttcagtaaaagttttgatggatagataatgaaataattggctgtttgatgttaatcacctgtggcgacaatgatagctataatgcttataattatggatagagtttgttcgtatgatgcctgaatgattgtatgcaaacgtataaaatagtatttgtctctgttaatgtacattcacagatgtatagtatttgataagatatgtagtttaagaaaatataagaaacattttggacaaaacatatggaaaagttgtggcatatttatgatctaaaatgcaccttcatggtgagacacgtccaaaaaaagagctgggcttatgatatatgatgcattttccttctttttttcagtaaacgatctgaattaacgctggaaagttggattcgatcaccttgtcttttatactgttgaaattaatcaaggatcttactgcctagtgtcttttctcaaaacttatagtacaaaatttgaatgttatatcgaaaaaaccatacaatgatccatgattttctggagatatgaacgcctaagatttgtagaacgagaatctctcacatcgaccacactttgattttttatccattttaggggttcccacaaatgctttagtcttttctgagtctttgaacataaatgaattttagaaggattgtatttatctacattttaaatttgggcctctgtttattttatttacaatcttcgttttttgttttatgagccaggatttcaggtttgtcactcacttggaggagggactggttccggcatgggaactctcttaatttcaaagataagggaagagtatccagaccgaatgatgctcaccttctctgtttttccatctccaaaggtttcagacactgttgtcgaaccatacaatgctacactttctgtgcaccaattagtagagaatgctgatgaatgcatggtcctcgacaatgaagccctctacgacatctgttttaggactctaaagctcactaatccaacttgtaagttcctctctttgatattaacttaaatgatcatactcttttcattttagaacgttccaaatgtatcgcatcattcctaaaataacggagtattattacatttaaccttctagctcaaactttattacaaaaagggcaacaaaatggaatttattaattctaaatcctgatgtaaaatcatcgagtttagttaagcaacgttatataaattgatagtttgatacgaatggagtatcctttttgtttgcagttggtgacctaaatcatttgatatctgcaacaatgagtggtgctacatgttgtctgcgatttcccggtcagctgaactcagacttgagaaaattggctgtgaatctaatccctttcccacgtcttcatttcttcatggtgggattcgcaccactgacatctcgtggatcacagcaatacagttccctcacagttccagagcttacacaacaaatgtgggatgctaagaacatgatgtgtgcagctgaccctcgtcatgggcgttacttaacagcatctgctatgtttagggggaaaatgagcactaaagaagtagatgaacaaatgatcaatgtccaaaataagaactcgtcgtactttgttgagtggatccctaacaatgtgaagtctagtgtgtgtgacattccaccaactgggcttaaaatggcatccacatttattggcaattcgacatccattcaagaaatgtttaggagagtgagtgagcagttcacggccatgtataggcgaaaggcatttttgcattggtatactggggaaggaatggatgaaatggaatttactgaagctgagagtaatatgaatgatttggttgcagaatatcaacagtaccaagatgctactgctgaggttgaggaagattttgatgacggcgttgatgagcattacgaaggtcaatgacttttcaaatttttgtattactactcagaggcggagccagaattaagagtttgggggttcactgata

SEQ ID NO: 219 - DNA, 2071 bp, Solanum tuberosum
  source 1..2071: mol_type = genomic DNA
accaattctgtgtgtgtccattaactttagacattgtccctccatttatttatgatgtctccgtagaatcagagaagaagcggaggagcagagcaaagcattcaaattctggagatcatcggaagtcttcataaaaagcttcttcattgattctattgctcgctcattctgcaaaaaacataccattaaaaaaaacacagacaaaaaagagaaagatgagggaatgcatatccgttcacattggtcaagccggtattcaggtcggcaatgcttgctgggaactttattgcctcgaacatggcatccaggtcctctccatttctttaagttttcttgaataatgttaatatgtacatctttcatctgtcttttcatatctttaagaaatgagtgaatcataccgtcaattagttttttctcatcccataatgtatcctgaattatttgtgtgtttaatagccggacggccagatgccaggagacaagactcttggaggaggtgatgatgccttcaatacatttttcagcgaaaccggctcagggaagcacgttcctcgtgctatttttgttgatcttgagcccactgttattgatgaagtgagagctggaccatatcgccagttatttcaccctgaacaattgatcagtggcaaagaagatgcagcgaacaacttcgcacgaggacactatacaagtacacattctgcaccttattcaattgtgccctcattttgaacttgtgatgtaactcttgagagttctactattttgtttttctttaccagttggaagggagatagttgatctttgcttggatcgaatcagaaagctcgcagacaactgcactggtctgcagggttttttggtctttaatgctgttggtggaggcactggttctggcttaggttcacttctattagaacgtttgtcagtggactatggtaaaaaatccaagcttgggtttactgtgtatccctctcctcaggtttcaacctctgttgtggagccatacaatagtgttctgtcaacccactccctattggaacacacagatgttgctgtcctgcttgataatgaagccatttatgacatttgtcgtcgatccctcgacattgaacgtcccacctacaccaacttgaaccgattagtgtcacaggtattggcacatttacaactcctccattttgtaatggctcaagcctaactataaaggtattgggggccagagcagacaatacctcgtcagttgaaccgtttgacccttgtatgattttgtttctcttatcaatgtaatgagttttctaacttctaatcaggtgatctcatctctcactgcttctttgaggtttgatggagctttgaatgttgatgtgaatgaattccagactaacctggtcccatacccaaggatccacttcatgctttcgtcttatgctccagttatatctgctgagaaggctcaccacgaacaacattccgtggcagaaatcaccacaactgcttttgaaccagcttctatgatggccaagtgtgatcctcgtcgtggcaagtatatggcgtgctgcctaatgtatcgaggggatgtggttcctaaggatgtgaatgctgctgtatccattatcaaaaccaagcgtagcattcaatttgttgattggtgtccaacaggctttaaatgtggaatcaattaccagaccccaaccgttgtccccggaggtgatttggccaaggtacagagagcagtgtgtatgatatccaattccactagtgttgctgaggttttctctagaatcgatcacaaatttgatctaatgtacgcgaaaagagcgtttgttcattggtatgttggtgaaggcatggaggaaggtgaattttctgaagcccgtgaggatttagctgcacttgagaaagattatgaggaggtgggtgctgagtatgggcaaggtgaagagggtagtgaaggagaagaatactaattaatgagtgaagatcattagatgttttttctatacgcttaatatttgtaaaaatagatcactttatacatgtacatgctaaatttcattatcggata

SEQ ID NO: 220 - DNA, 7838 bp, Solanum tuberosum
  source 1..7838: mol_type = genomic DNA
ccaccattgtaacacactcaagagaatgacataatttcgtaagcctcactttttttccctcttttctttttcgaaacccccgtactggctacgccccacaaaaagcgaccaaaaagccaaagtagaagctaattccgattgctctttctctccctctcgcagatccataactcctgatacagctaagcctgaaggaaccaacgagtaaaaaagtagaaggaaaatgccgagagaaattatcacattgcaagtgggacaatgcgggaaccagattggaatggagttctggaaacagctatgtctcgagcacggtatcagtaaagaaggtatccttgaagattttgctactcaggtatataacttattcgctttgttatgttcagtgtgcgtgtatgcaagtagtatacagcgtctataccaaatattaggttttgacttgcgtgttgtgctttaccttagattgtctttttttcagtatttggttgggtatacaaatctgtacaaacataattgtaggaggagaaatatatgaataggatagtgctcttggcgaaatttttaaaaattaaatgttgacaattgtgtagaactgttggttgaatgaagtgatatgaaacaagagttttgtttgcaaaagaaaatgatttttgcacataggttagtgagcaaagccattttcactgtttcgtgagaagtaattcccttgaacaaaacattttctataatccaactaaccaaacacataatttcaaaacattttcctggaaccaaacgcgccctaatagtgttctgctgttcaagttcccgtcgttcttatgattttacctgtttaggtatatgcttgtctgaatcgtaccttttttcgtcacattttggaaggaaaaaacataggtagcatttaagtaggggttttgtaggttcagcgtctcttttttatttttttgtttattttgaaattaaagctttttatgacaactttgttttacaattgatttattggtttaaattgagatagttttctgtcgttcatttactccgtaaggaaaatgtttttttttttttctcgctgtggtggaaaatgaaatgcgaatctaagagaaaaagggctaacattaaagtactattttaaatgcagagatacttaggtttgtctcttttgtgttcagcataaaatgcaagtggtgatagatacaagtgacaactcagataaggattattggttagatcatgtagtagttagtgagacagtttagtcaagttattctatgacaattaaatttagtgactttgaaatctacatgggaagctaaatatccctccgaattgcataccaaagaagcatcacgttgtttaagtaaaacatctgtctgttatcacgatgagtctttttaatccaaattatggtgcttgttggttacaccacaacactacatgttttacttttgaaaagttatgtggttttgcttggaatttgttgtgttgaacttatcatcagttgatagatgtgctgtttctaagaaaataattttagggagcttgaagcttgattgtctgcaaattatagattcgattctttcattttctgatctgatttatgctacctagtggcgatggatgtttacacatgtacatacaacactatcattgagccacatgcttgtgaatggttgatgtacaggtcctcatccacataggcaacaagttcttatttgtttttactcacttgcttgtgtgattaagtgcttgtattttcatcttaagaccactctcttatacaacatgaataacctacattactttattgtgatgaatatttaatgctgcagggaggtgatagaaaagatgtatttttctatcaagcggatgatcaacactacatacctcgagcattattgatggatctagagcccagagtgattaatggtatacaaaatggtgaatataggaatctctacaatcatgagaatgtattcattgcagaccatggaggaggtgctggaaataattgggcaagcggatatcatcaggtctatttgttttcttttaaatctttgtatcagttaggtactttggtaaagctgagtacttttctaaacatgggggtattaatagaaaatgatcaatcatgtgtaggaacaaaccaatgccataaatatcctcagctagtttctggactaccatttattaagatttctatattcccaaagatgctccaccaatgttacaggcaatactttcactctcagtgttattttagtggcttggatgtcaatttggacgaaggagccaagctcataataactgtgacttatcctgacttctgaaagaatatatccactctttgaccgccgttacagttttgattcgagatactttgactgagttgagaaaaccagtagatgtcatcaacttcttcatcaatccacttccaatactattctgtatgctttttctgtgatgttcactcgacttgcacctttgtagagtctttattcagaaaacaatcttgaagtgcttcatggacctttcattttgttgtcccgagagcttgaattagtagtttctgaataatttggtaaaaccattttttctaccagggtaagcaatatgaggaggatctaatggacatgattgacagggaagcagatggaagtgatagtctcgagggttttgttctatgccattcgattgctggtggaactggctcaggttgactccttttatttagttggttcagattgtgataacttcagtagattgggtgagaattttgtgtggatatttattatgttgctgatcactgtctttagtgcaggtatgggctcgtatctgttggaaactctgaatgatcgctacagcaaaaaacttgtccaaacctacagtgtctttccaaaccaaaatgagacaagtgatgtggttgtacaaccttacaattccctattgacactcaagcgcctgacattgaatgcggattgtgtagttgtacttgataatactgcactcaatagaattgctgtagaacgcctgcatattacgactcccacctttactcaaacaaattccttagtgtctactgtaatgtcagcaagtacaactacactacgctacccaggatacatgaacaatgacttggttggactccttgcttctttgatacctacaccaagatgccattttcttatgactggatatacaccactcactgtggaacgtcaagtaagatatctgttcttatctgtcagtgtttttttgtaatgttctaaatgtaactgtaatggtgattgctgattattatctttttacttctgctctctcatagtagctcaattgtctcacaattatttaaacaacttaagtgcacgaaaaagaaactagcgatatcaggttgctttgcacatgtacaaaatcattattgacccgttcaaaatctatcctattcctctctctccacaccacccacataagagcccatagggcggtatcctatcctttggtattctctttctttgtttgaaagcacaactatgaatgcatcctttactattcatagtccactgtatcctaaaccaattctgaacattcccatatagtactagctgacatatgtaattcttctcttttctcaaattctcagctgacaattttgctccatgagattgttttatagttatttttatttgctatagtgggacctgatattaagattaatatcactttgttttattgttttttctgatttcaatatcttgtcattgtctttggcatcttgtaatttgaaccatctaaattgtgtgcttgtggatatcaagatacttaagcagtaagcttttgatttattgggggatgggaaaacaaaacattgcctgattcacgtgtttcccatgaaaaaaacagatctaaaaatatataattctaattaatgcagagcaatttatcttggtgtaactgattttgtgaagtcacttttttcccactattatacctatcaagaaaaagagaagatgataaattggccatctcacaaataggtagttatttcttcttaattccactagctcattctctattcatctattcttttcgcttttctgtttcctagtaaaattgtatcatgcagcttgtgtgtggggcattcagtagtgacaactgaagcatattgctaataatcttctttttgcaggctaatgtgattcggaaaacaactgtacttgatgtgatgagaaggctccttcaggtctgtaaacctgctctctatattttcctattgaaagcttttgcagatatactcatggactttcactttgcagaccaagaatatcatggtttcctcgtatgctcgaacaaaggaagccagtcaggctaaatacatatccattttaaacatcatccaaggagaagttgatcccactcaggtattcatgattattgtttaacaacttttacggtgtaactccttttctttcttcactcgtgctatagaaaggtctgattgtttgaactttgaaatttgattgaaatttctttcgaactggaatgattctaagcagattctaattctggctgtttggaaaaggcacaccacatgagccatgtttttggaacttcaacaataaacttggttttatgttgttatcatgtaatccttaacttgcattatttcccttgagaagtttcaagattatttcagttgcaactaagacatagctttatcacccaaccacccaaagggacattgtttttccattttatacatcaagattcctttgtagtcatgaatcttggggatctagaattatattatattgctcatctgttagccgtttcccaactttgtaagctcagagcgtatatcaagacaacatatgcatacacaaagcctcactacttcttactcatttgatgtttcgtgaatcaggtccatgaaagcctgcagagaataagggagagaaagcttgttaattttattgagtggggccctgcaagcattcaggcaggtcttttggccataataaattttgagatttagcttttcttatcctacttcttgactttgcattaccttcctttgcaggttgctttgtctagaaagtccccttatgtccaaactgctcatagggtaagatatacttctattgtctacttgttcaatcttttgtgctgaaggctgttaatctgagttgtacagcttatgaactgcttaagtgactttcttagagattaaggatgtatagtaatgtaaaagtcaaagcttgttgtccgttaattcagcttaccaacttgttacctttgtcaaaaaaaaaaaagttcatcttaccaacaaatcaagggagtaaaattgtacttgtaaagtaagtttgacaacatgaagtagttgtttgttctgtgtttctaaactgatgcttgatccattaggtgctgttgctgaatccgaaggttctacatagtttatagtttgagctttaataacagacctatagcataacttcttaaagttgaaaacataacagatattggtaacttatgtttgaaaaacgcatttcttgtaatgggcaaatatagtatatatttcagttgctgacatgataatcagctgaggcaagccagattagtttgactatctggtcttcacgttcagtcgtaaatcactttcctgaatgttgtttggaccttgtaaagctgtttgtttccttaaagatctgtaatattactgtatgttttccaatgtatcaggttagtggtctcatgctggccagccatacaggtatccgccacttattcagcaaatgtttgacccagtatgataaattgagaaagagacaagctttccttgacaattataggaatcatccaacgtttgccgtaagttctgtttcaactctgtctttctgatataatctactaagaataagaggcagcacagtgtatagtttagttattggtaagtcagtcctcattccgcccctggatttggttttgtatctagcttttctgcttgcatggctaagaaactgataagtaaaacagaatagacatttgttgtgctctgtggtttctgcaaaactgaacctgaatctgaaattttttcaagttaaatctgtcaacttctataggaaactatgacatgctttcttcctcagtactgtatttcctttccaaacctgctttgaattgttttacttgagccgacggtcttctggaaacatcctctttgccttcacaaagtaaggggtaaggtctgtgtacacaccaccctccccaaaccccacttgtgggattacattgggtatgttgttgtattgctctgtcactatacaacagtatctatgtctatagctgccgtccacatcttaagtaagattaattgatgaatttgtgcagctgatattctatatctaaccaattacataatcaaataatattgtttgtcattgtaagaatgtacggcctttagagaacaaaagagaacacttggatatatgaaatgtatttgatgatgcctactaacagaaagtcattgaaaaacctggattgacatgtttttatttattggcttagatttactttgtcattagataattttcctcaagtaatatatagagttgtatatgttacggagaaacaagtagctaaattcgaaaagtaatactcccttcgccccaatttatgtgacacttttttcttttcagttggtccgaaagaatgacatctttctatattttgtaacaatttaacttcagacttcccattttactattaatgaaatgttttatagccacaaaaacttctatggcttattctaaaccgcaagttcctaaagttttcattttttactttaactctgtctccagtcaaacaccttcacataaattgggatggagggagtataaggtttctgaagtacaatactcaaaagtgtgtcaaacacgttcacataaattgggatagaggggagtgagtataaggttttcttgagaatagaacagtgtcctttatgatattttgacttgtgggcatgaggtctaaagttggactttaaaaaccatgcttctgtgaggagttaaaatccttagctatccctataaaggctcaacaatttggagaaaagattgcatcagtatgtcaatatcacatatggatgtttgtcctatgtcccgtttgggcgttttagcccccagctgagcttcttgcttttcttgttcaacaaggaatgatctgtccatgcgggagtcgaagaaccctagctttaatctacatgcactttcctgtaaaagcttttgttggttcatttatagtgatgtttgctttaagctttttcctctttaatttttacgcataatgggcaggacaatgatctatctgagtttgacgaatctagagatgtgattgaaagtcttgttgatgagtacaaggcttgcgagtccccagattacatcaaatggggaatggaggtaagtgctactgtgctagtactactatactagctagtctgtgttgcctgttatttcatgttctgcatcacaaatgggctaatctatttgtgcaggatcccgaccatgctctaacaggcgaaggaaacgctagtggaacgattgatccaaaattatctttatgagcaagccaactattccctgtttcaactctgcatgaaaaaaaaagagactttgttccttgtaattatctctataatttaaccctgactagtcttcatgagaattcaatttgggactcaacttatttgttaagagtcatttggtgttgttaacattagcaaattcatggtaagatgtgaaattgttctagagaaatctccagcaatgaagtactgtttcatatatata

SEQ ID NO: 221 - DNA, 1924 bp, Solanum tuberosum
  source 1..1924: mol_type = genomic DNA
caagaggtcaaattaaatctaaccgttgatttagtaaccgttacccggagccccggctccgccacccacatatctctcaaaaccctaaattaatttaaatttcactataaattcaactccccctttctccgtccctacacacaaaattctctttcatttctctctgtttctcaaaaattctctcaaatttcaacaaaatgcgtgagattcttcatattcaaggtggacaatgcggcaaccaaatcggtgccaagttttgggaagttgtttgtgctgaacacggcattgattccaccggaagatatgccggagatgctgatcttcagcttgagagaatcaatgtctattataatgaagctacttgtggaaggtttgttccgagggcggttcttatggatctggagccgggtaccatggatagtattagatctggtacttatggccagatctttcgtcctgataactttgtgtttggacaatctggtgctggtaataattgggcgaaagggcattacactgaaggcgctgaattgattgattctgttcttgatgtggttcgtaaggaagctgaaaactgtgattgccttcaaggtttgttgctcatttctttttgggtttgttgttatggatctgcgtttttttggattatgtataatgtgttttcattgtggtttttggtttttagggtttcaagtttgtcattcattgggtggaggaacaggttctggtatgggtacccttttgatttctaagatcagagaggaatacccagaccgaatgatgcttacgttttcggttttcccttcccctaaggtatccgacaccgtcgttgaaccttacaatgctactctgtctgttcatcaattggttgaaaatgctgatgaatgtatggttcttgacaatgaggctctatatgatatttgcttcagaaccttgaagcttaccacccccagctgtaagatcctttaagcgttttgatttgttcgtttctgctttatagttgttgttcattacttgttgaaggtatttatgttttttcgtattgtttgatggaacagttggagatttgaatcatttgatatcagcaacaatgtctggtgttacctgttgtttgcgtttccccgggcagttgaactctgatctccgtaagctggctgtcaatttgattccattcccaaggctccatttctttatggttgggtttgcgcctttgacttcccgtggttcacagcaatacagagctttgactgtccccgagcttacacagcaaatgtgggatgccaagaacatgatgtgcgcagctgaccctcgccacgggaggtacttgactgcctcagctatgttcaggggcaaaatgagcacgaaagaggtcgatgagcaaatgctcaatgtgcagaacaagaactcatcctactttgttgagtggatccctaacaatgtgaaatcaactgtttgtgatatcccacctactggacttaagatggcctccaccttcattggtaactcaacatcaattcaggagatgtttaggcgtgtaagtgaacagttcactgctatgttcaggagaaaggctttcttgcattggtacactggtgaaggaatggacgagatggagtttaccgaagctgaaagtaacatgaacgatctcgtgtcggagtatcagcagtaccaagatgccactgctgatgaagaggagggagagtattatgaggatgaagatgatgctcaagaggagtaaattgaaacgtaattgaactctttaatatggatgaagccaaaccgcaacttccagttgatgttctttttggctttgagatgtaatagttcaaaacttgaagctttaatattttgtaatagttcaatttgctatggaagactactttcaatgttgtgatattaatgtggcttgtctgttggtggttaa

SEQ ID NO: 222 - DNA, 2331 bp, Solanum tuberosum
  source 1..2331: mol_type = genomic DNA
atgagagaaatccttcacattcaaggaggacaatgtggaaaccaaatcggttccaaattctgggaagttatctgtgatgaacacggtgttgatcctactggacgttacaaaggaactgccgctgagtccgatcttcaacttgaacgtatcaatgtttatttcaatgaagcttctggtggacgttatgttcctagggctgtgcttatggatctagagcctggtactatggatagtatcagatctggtccctatggacagatcttccgtcctgataactttgtgtttggacagtctggtgctgggaataactgggcgaaaggtcattatactgaaggcgctgagttgatcgatgctgttctcgatgttgttcgtaaagaagcggagaattgtgattgcttgcaaggttttgttcatttctaatcgaattttcatttcgtttatgaatgtgcctgttgcctttagtttctgtttttcgttttcattgcgaattgcttacttattattccgattggtagttaacagtgcatacattagatccctttcttattgtcattccaaatcctatgctaattgacccgatgtatgagtttatagttgacagtgcctttagaagtgcctatactagatctcttcctcattttcattccaaatcctatgctaattggtccgatgtatgtgcttatagttgacatagcctagatgtaaccgaatttgatcttgttttgatgcttgtttgttgtttctatgaatgtacgtacggtagcatagtcggttgtatacagatctcttttactcatgtgtaatcgtatgatctataatgcaaatgcctatatttgctgttaacaactcaaggtagaaataatgctgatgcgtatgtgcacatttgaatgttcatataaagcttgaatctcatagagcacacaaatgattggcataaaattgtatagtctagcagaaggataaatttaactttctcattatgcatctcacaacaagtcatactctcttagagttcatgatcgagtactgagatttatgatgtgtctggatcttactgatggcaatattagtcaatcgtcttgttttccttttccttccagttttggaaatttatctaagatcttatacacactgcttctttcttgaaaatttctggacaagtgatagtatctattgaataatctttatatgtttgatgcatcaatttggtgatcctatttctacaattattaccatttattgattgaggggtggtagttgactgatttatattctttattgtgtggatcaggattccaggtttgtcactcacttggtggagggactggatctggcatgggaacactactgatttccaaggtaagggaggagtatccagacaggatgatgctcacattctctgttttcccttctccaaaggtgtctgacactgttgtagaaccatacaatgctacattgtctgtgcaccaattggtggagaatgctgatgaatgtatggtccttgacaacgaagctctatatgatatttgtttcaggactttgaagctcactactccaagttgtaagtgtttctctttagtggtaaccaataatatgatctgcaagtttaagtaagcaaatgattaattttgcctattttctcttgtagttggtgacttgaaccatttgatctctgcaaccatgagtggtgttacttgctgtttgagattccctggccagctgaactcagacctgaggaaattggctgtgaatttaatccccttcccacgtcttcacttcttcatggtgggatttgccccactaacctctcgtggatcacagcaatacatatccctaacagtgccagagcttactcaacaaatgtgggatgccaagaacatgatgtgcgccgcagatccacgtcatggacgttacctgacagcttctgccatgtttaggggtaagatgagcacaaaggaggtagatgaacagatgatcaatgtgcagaacaagaactcatcctactttgttgaatggatccctaacaatgtcaagtctagtgtgtgtgatatcccaccaactgggctgaagatggcatccacatttgttggcaattcaacctccattcaggagatgtttagaagggtgagtgagcagtttactgccatgttcaggcgcaaggctttcttgcattggtacacaggtgaaggaatggatgaaatggagttcactgaagccgagagcaacatgaatgatttggttgcagaatatcaacaataccaggatgctacagcagatgatgaggaagagtatgatgatgaggccgctgatgatcatcaatatgaatcctaa

SEQ ID NO: 223 - DNA, 2994 bp, Solanum tuberosum
  source 1..2994: mol_type = genomic DNA
tacttttttagccctacatttcttcaataaagtctcattttcaccttacaaatctcaaaattttcatttctcttctctctttctaaccttcctccacaaaaaaccctctctgtttctcatttttctgctgtgaaaatgcgtgagattcttcacattcaaggtggccaatgcggtaaccaaatcggatccaagttctgggaagttgtgtgtgcggagcatgggattgatgccaccggaaggtaccagggagacacagatctacaacttgagagggtgaatgtgtattacaatgaagctagtggtggacggtttgttcctagggctgtgctcatggatctggaaccagggaccatggacagtattagatctgggacttatggccagatctttcgtcctgataactttgtttttggccaatctggtgctgggaacaactgggctaagggtcattacactgagggtgctgagctgattgattctgttcttgatgttgtgcgcaaagaagctgaaaactgtgactgcctacaaggtgtttgtttaattgcttttatgcttcttgatttgtttagattgtattattttccttgcatttctggcttctatctgttttatagatttaagatctgctgctgaggttttattacttgttgttaacatgtgtacacagtcatgtatgaatttaactatctaatctgaagtgttaaaacaatatgcagcttagttaagaagttttagaagttattttgcaaaccttcacttaatgaactaactagagatgatgtctgtaacgctttgtggcatgacaagtcagatctcttagtttgttgaggaaaggaggttaagaatgactcaaatatcaataggggaaggcggtgtgtgagagaaatatcagagtggtaaagctgatagcttaatgtacttggaattttgtgagaaaagtaccttagagacagcagtataattccagaagaagttcattagaaatagcaaaaaaataatcaggaataaagattgaagggagaggagaagatggtatcagacaacaaagcagctaagcatggtttggtattatatgtaagaacctaggatccaatttatttaggttataactggagtgggtaaatatacttatattaatcaatttgaagatttatgagcaatcttatgttctttggtgcttacatgtggtatcatatgcagggtttcaggtgtgccactccctgggaggagggactgggtccggaatgggaacccttttgatttcaaagatcagagaggagtacccagatagaatgatgcttactttctctgttttcccatctccaaaggtttcagacactgttgttgagccttacaatgccacactgtctgttcatcagcttgtggagaatgcagatgagtgtatggttcttgacaatgaggcactgtatgacatttgtttccgtaccctcaagctgacaactcctagctgtaagtagcctcaatttaatctgaattacactggcatatacttacatagtcattgatttccttgagataacttttagcatcatgatagaagatatctggatcttcactagtaagtgtgcatgttttcacacatttgacctaatattctctacgtgataatggtctttatgatggtgcagtcaatcctcctcccccctccccattttaatctgttttgaattaatttccccttctgttctcttgattaaaattgcattttgaacccaaatagattgtatttctctctatataacattaattgtgtgtagtttactaatataggctctcttggcaaaaagttgcattatgaatgtagacttggtggtatttttcacttgtctaaatatcaatattatgtttagtcaactaatacagctctagaggtcctctataactggtatactggccatctgtgagaattaaactaagtttgtaaacattacttatcatttcttagcttgtccctttaatctgcataaaatctactttcctgactgttgtttggttagctatatagccctatatgctttatgatgttttgtatactttattatctaaagttgcattttctgattctgttccttcatcttctaacagttggtgacctgaatcacctgatatctgcaaccatgtctggagtaacttgctgcctcagatttcctggccagcttaactctgatctcagaaagcttgctgtaaacctcattccttttccccgtcttcactttttcatggttgggtttgcaccacttacctcacgaggttcccaacaataccgggctttgactgtccctgagttaactcagcaaatgtgggatgcaaagaacatgatgtgtgctgctgatcctcgacatggccgttatttgacagcatcagctatgttccgtggaaagatgagcaccaaggaagttgatgaacagatgcttaacgtgcagaacaaaaactcttcttactttatcgagtggatccccaacaatgttaagtcaacagtctgtgatattcctccaactggtctaaagatggcatcaactttcattggaaactcaacctcaattcaagaaatgttccgtcgtgttagtgaacaattcacagccatgtttaggaggaaggctttcttgcattggtacactggtgagggaatggacgagatggagttcactgaggctgagagcaacatgaatgatttggtctctgaatatcagcagtatcaagatgcagtggcagatgaggaagagtatgaggatgaggaggaagaagatccatatcgtgactgatgtgatcatgctgtgtaattttacttgaattgatatttgtagtagtttctttccagttgtggttgtaacctcaactaccatctatccgaacccatccaagacatttatttgtagttgtctttaactgcaaacacagttccttcaaatattagctttgttttttattatctaccttgaaatattagtacttgcagattgaaggttatcttta

SEQ ID NO: 224 - DNA, 3180 bp, Solanum tuberosum
  source 1..3180: mol_type = genomic DNA
ttcaaattttcaaacaccacaaaaccccaatcaccacattcccttataaacaaactcattttgcttcattttttttcttcatttctcatacaattcctagaattcatcattctctctcatttcattctcgtccttcctccctcgacgataccctttatctataaaaatgcgtgaaattctccatatacaaggtggccaatgtggcaaccaaattggggctaagttttgggaggtggtatgcgctgagcatggaattgatgcaaccggagcgtaccatggggagacagatactcaacttgagagagtgaatgtatattataatgaggcgagttgtgggcgcttcgtacctcgtgctgttcttatggatttagagcctggtactatggacagtgttagatctggaacttatggtcagatttttagacctgataactttgtattcggtcaatctggtgctggtaataattgggctaaaggtcattatactgaaggtgctgagttgattgattcggttctcgatgttgttaggaaagaagctgagaattgtgattgtctacaaggtattttgtttaaatgttgctgcatatcttttgatttgttgaactcgtgctgattgttttttttaattgatttgagaaagtgtaattgtgatgctgatacggtgtttgtctaaatgtttatgtgtatttttcatttgttaattcgtgctggttgtttttgatgttgtaagtttatgattttatgcgtttgagaagcttaaaattatttttgcctacaatgtgtttgtttaaatatttatgcgttttttttatttgtttactcgtgctgattgtttttttatattgtttgtaaagaagctgagaattgtgattgcctaaaaggtatttgtttaaatgtttatgcataattttgatttgttagtttgtgctgattgttttgatattgaaaattctgtgagtttttatcattgagaagctgaaatcacaaacatttaaacataaattgtgatgctgccaaggtgtttgtttgaatgcttatgcatgtcatgatgtattttgttaatttgagaagcataaaatcgtgattgcttacatttatgtttgattgtgcctacatggtgctgtttaaatgcttgtgcatacactgatttgtttatcttgtgggattacgtttgatatggtatgttcaataggtttaccttttcatatatgcttatgatttcattttgttatgtgaacatagtcatgttatcacacttcaggtctggtatgtgtgtgtatttagagaatttatagttttagagaatctcgacttgctttaaaagatgaacattgaatgaatcaatggctggtacacagtgggtgggtgctatgttgattgaatctattcttgaggttgtgcacaagtaacctgagaattgctattgcctaaaggtgttctcgaaatgtttgtacatataaagatttataaacttgtggagttggttcaactatcagtctatcacaaattctaatgtttattgatttcatttgcctgtgactttatttttttgggtatatagatagtcatacatgcaccattgttgcttatatgtgtgactatatgcagggtttcaggtgtgtcattccctgggaggagggactgggtctggaatggggacacttctcatttcaaagattagagaggaatacccagataggatgatgctgacattctctgtctttccatctccaaaggtttcagacacagttgtagagccttacaatgctacattgtctgttcatcagcttgtagagaatgcagatgagtgcatggttcttgacaacgaggctttatatgacatttgtttccgaaccctcaaacttacaactcctagctgtaagtattctctattcatatcaatgacatgactcatttacttaagcgtctagttcaacatgcgacgactttgagccgtggtgatggagtcttcaatatgttatttgatgttagataattgaaactaatatcctgattagtgacagtggcctcccatttttgcagccatttaattttttcttttcactttcattttcttaaagcttatcttaatcaatcttcatgaaatgtggttcaccaactgtttagttattaaaactctccctcaattttcattcatagtctaactttatatagtgaatttttgcgtagctgaccataactcatttgggattgagggttggttggttgtgtttgcttagcaacaattaatatgaatatgcttcatgctgtgggtcacttattctgcaacttctgagaaacttatccttttcctgatggtgcttttgttttctaacagttggtgatttgaatcacttaatttctgcaaccatgtccggagttacttgttgcctcagattccctggacagcttaactctgatctacggaaacttgctgtgaatctcattcctttcccccgtctccactttttcatggttgggtttgctccacttacctcacgtggttcacaacaataccgcgctttatctgttcctgagcttactcaacaaatgtgggatgcaaagaacatgatgtgtgctgctgaccctaggcatggccgctatttgacagcatcagcaatgtttagggggaaaatgagcaccaaggaagttgatgagcagatgcttaatgtgcagaacaaaaattcttcatacttcgttgagtggattcccaacaatgtcaagtcaacagtctgtgacattccaccaactggtctaaagatggcatcaactttcattggaaattcaacctcaatacaagagatgttccgtcgtgtcagtgagcaattcactgccatgtttaggaggaaggctttcttgcattggtacacaggggaaggaatggatgagatggagttcactgaggcagagagcaacatgaatgatctggtctccgagtaccaacagtaccaagatgcagtagcagatgaggatgaagaatacgaggacgaagatgaagcatatcatgactagtatgcttatgccgggaaatcttatcttatattttaagtaatagttcgtttcaactgtgcatgaactttagtagtgaagagaaagcgactaacctgtatttttgtcaaacttgtcactatcccttaattgcatattgaatatttgttgcttttgctaagcaatctgtga

SEQ ID NO: 225 - DNA, 3004 bp, Solanum tuberosum
  source 1..3004: mol_type = genomic DNA
agcttcatttcccttacccctactcttctcactctttctactactctctcgatcgagtgagtagttctacgtcactgttcatcaattttcagatctcttcaattttctctccgattcagaaggtatgttttctgtttactgttcgcagatctattgtttttgaattgcatttgatgatttttactgtgatcgatgattttttgctatagtagagtgattttttttttcagtttcattgtatattttgtgaaaatcttccgtgtaggactgtatttttagatctgtaatgtcataatgtaatttttgatgagttgtataatgattttctgctatcgtaaaatgattgattgcctcattttccttgtctactatgtgaaaatccttcgcgtatgatgatatttttagatctataatgtcatattgtgatattttggttcattttatttagtttgatctgtttctgcaatattttctacttgaacattttagatcaatgagttttctatgttttttagcttattgcatttgtgatttttgatgatttttactgtgattaatgattttctgctacttgaaatgatttttgcctcattttccttgttttgttaaaaatctactgcaaatgatagttttagattggtattgtgttttttttagctcattgcctcattttcaatgttttgatcgagtgaactttctgtgttttgctaattttgagatctgagaattactgtttgttagatcacatgttgtagagttgctgtatttttgtgtagaatgtactgtgagtagtttaattgttgagatctgtggaaaatgtgatttgtatagttatttgtgtgaataatgtgcttgatgtaatagaattggatcagtatttcgtaatgatattgatgctatttaaacgcgcaaattgcttcaaggactaaggtttatccactgaaagtaatgattctataggtgaatgtcgtagtgatccatttagtttagtgagaatcagatatatttgattgtgaatcatgaattttataatttctgtagtggtttttaatttaagagaagaacttagaacatcttgtttattacagaaaagatgagagaaatccttcacatccaaggtggacaatgtggaaaccagattggatcaaagttctgggaagttgtatgtgatgaacatggaattgatccttctggacgctatgttggaacatcagatttgcaattggaacgtgtcaatgtgtattacaatgaagcttcatgtgggaggtttgttccccgtgcagtgctcatggatctcgagcctggcacgatggacagtgtgagaactggtccttatggccagatatttaggcctgataactttgttttcggccagtctggtgctggaaacaattgggctaagggtcattacactgagggtgcagagcttattgattctgttcttgatgttgtcaggaaggaggctgagaattgtgactgtctccaaggtatattcatggatttgagtagtatttcttagaatccttagtcggtaatacaactgtgcttaatttgatcactattgtggtgttattgatacatttttctactttttgcaggttttcaagtgtgccattcacttggaggaggaacaggttctggaatgggaactttactgatctccaaaattagggaggaataccctgatcgcatgatgctcacgttctctgtgttcccatcaccaaaggtttcagatacagtggttgagccatataatgctaccctttcagtgcatcagctggttgaaaatgctgatgagtgtatggtgcttgacaatgaagctctatatgacatttgtttcaggactctcaagcttaccacacccagctgtgagtatacgttgtccaaattgataatttttactttttgtctatgtgctttgattatcaatgtatagattttaactttcgctttcacccttttttgaactggtgaaaatgcaaccttcataaataagtatttggttataaagtggcttctctagaattgtgataggttttcttctcatcttttattacacttgctaaatgctttatcatgttgcagttggtgatttgaaccacttgatttccgctacgatgagtggggtcacttgctgcctcaggttcccgggtcaattgaactctgatcttaggaagcttgctgttaacctgatccccttccctcgtttgcacttcttcatggttggatttgctcctctcacttctcgtggttcacagcaataccgtgcacttacagtcccagaactgacccagcaaatgtgggatgccaaaaacatgatgtgtgctgctgatccacgtcatggtcgttaccttactgcctcagccatgttcaggggtaaaatgagcaccaaggaagttgatgaacagatgattaatgttcagaacaagaactcttcctactttgttgaatggattccaaacaatgtgaaatccagtgtctgtgacatcccacccagaggtctctcaatggcatccaccttcattggaaactccacttccattcaggaaatgtttagaagggtgagcgagcagtttaccgctatgttcaggagaaaggctttcttgcattggtacacaggggaaggaatggacgaaatggagttcactgaagctgaaagcaacatgaacgatcttgtgtctgagtatcagcaatatcaagatgctactgctgatgaagaaggtgaatatgaggatgaggagtacgaggtgcaggaagagaactgaagaaacagtacattttattatatgttgtgtaatatgtttctgatctccctgggttttgagcatttctttttcttgtatgtgttccatatttgtttacactttgctggagagagtgacgagcgtgggtttgtactttgtagttgtaatactgttacctgtttctgcttaaatatttgttcatcttttgtcgttttcgatttagaatttctcaagaagtaaagaatggcttgtcgaggaaa

SEQ ID NO: 226 - DNA, 2381 bp, Solanum tuberosum
  source 1..2381: mol_type = genomic DNA
ttttcctaaacccaaattctctcttccccacagtaatcccattcattcagtttctcgcgaaaacaaaagcaaaaatgcgtgagattttgcacattcagggaggacaatgtgggaaccagattggagctaagttctgggaggttgtgtgtgccgagcacggcattgattccaccggaaggtacaaaggagagagtgaccttcaattggagcgcgtgaatgtctactacaacgaggcaagttgtggaaggttcgttccacgcgccgtcctcatggacttggagccgggaaccatggacagcgttagatcaggtccttatggtcagatattccggccggataacttcgtctttggtcagtctggtgctggtaataattgggccaaaggacactatactgaaggagcggaacttatcgactcggttatggatgttgtaaggaaggaggctgagaacagtgattgcttacaaggtaatttggctgttgcttttcgtttagtgctttttgattctataacagaatttattttgtaacatgtgattactcggacggtgatcgggctgtgtatgtacttgtgcacgatagcaaagtcaggaatttcgctaagagtgttcaagttttttttcatatactttgtattttttttatacgaccggtataatttttcaaagaaggatgtttaactgatcatccggtgcgtgtggtatgtatgtccaacttagcaagaaatcatgtttacgtcgtaataacaatgcaattttaaatttagatgtttgaagactgatgtattcattccctgtttgaacaaatttttgttaggcttataagagagaaatgaagtttgcgtttgctataattttgttgattatgtgcagtaaatggcttgaattcaagtaaattgtctattttgtaaagcttatgaatgtggactctgttttaaatttcaggttttcaggtttgtcattctttgggaggtggaactggatcaggaatgggaactctcctcatatctaagatcagggaagagtacccagacagaatgatgcttactttctctgtgtttccttccccgaaagtttccgacactgttgttgagccctataatgctactctctctgttcaccagcttgttgaaaatgcagatgagtgcatggttttggacaatgaagctctttatgacatttgcttccgaactctcaaacttactactccaagctgtaagatgtcttttttgatcagcaatagttttttttttggtgaaactttacagttttgatgttttggttcttgtatgtcatgtactccctgtagttattaaatttacgctgtatctatgcttgtcttgtgtctgattctttctatcctggtattgagattctgttggatttaccctttttatatgattgtattatgctagtatatgtagattaatgtactaactcgtgatgtttgcctcagttggagatcttaatcatttgatttctgccaccatgagtggtgtgacttgctgtctccggttccctggtcagctcaattctgatctccgcaagcttgctgtcaacctcatcccatttcctcggttgcatttcttcatggttggatttgctcctctcacttctcgtgggtcacagcaatacagagccctgactgttcctgagctcactcaacagatgtgggattcaaagaacatgatgtgtgctgctgatcctcgtcatggtcgttatctgactgcttcagcgatgttccggggaaaaatgagcaccaaggaagttgatgagcaaatgataaatgtgcagaacaagaactcttcctattttgtggagtggattcctaacaatgtgaagtctaccgtctgtgacatccctccaactggactgaagatggcctcaacttttattggcaattccacctcaattcaggagatgttccgtagggtcagtgagcagtttacagcaatgtttcgaagaaaggctttcttgcactggtacactggagaaggtatggatgagatggagtttacagaggctgaaagcaacatgaacgatctagtttctgagtaccaacaatatcaagatgcatcagctgaggaggaagattatgactacgaagacgaggatgaagaaggtcaagaagcttaactaattcagctggtgagaattttcgagtggtgtttatgccagtcgtcccactgttcattcttttaaatgttttagggtttggatttttgttttgcatgtgacatcgtggtgggacagttgctcaatcccatgtagttatagttggtgttgcttcacatacctatcactgtaatctagctcattgtattcttattagtaccaatattttgcgactaagggaattgtggctcgcttcaaaaacgatta

SEQ ID NO: 227 - DNA, 3654 bp, Zea mays
  source 1..3654: mol_type = genomic DNA
gcttcggcctctccctcctcctcgctcgctcgatcgctcccacgtcctcgcctccctccacaaaccaccaccaccatccaggatcgcagcgcggcgcgcgagagaggggtgagcaggtcgggcaagatgagggagatcctgcacatccagggcggccagtgcggcaaccagatcggcgccaagttctgggaggtgatctgcggcgagcactgcgtcgactccacgggccgctactcggggacctcctcgcagcagctcgagctcgagcggatcaacgtctactacaacgaggctgggggtggccgctatgtgccccgcgccgtgctcatggacctggagcccggcaccatggaatccatccgcgccggccccttcggcggcatcttccgccccgacaactttgtctacggccagtccggcgccgggaacaactgggccaagggccactacaccgagggcgccgagctcatcgactccgtccttgacgtcgtgcgcaaggaggccgagaactgcgactgcctccaaggtatgcacctacacatcaattccacgctaggctagctgttcctttcgtcgatctcgtgtttccgcagtggatcggtcgcgctctgcttcaatcatcaactctgatctcatggtattgcctgcttctgtctcgtaatttagatcgggcatttgagacacaaatgcagaggacatcgattttggtccaaatttgtacgtcacagcagtgttagaatttgtcacgtacattgtgaatctgctgcaatcatcctgcatttgtgcctctaacagccatggatggatgcacgcgattgcttgatccttcgtgaggacaggaataggacaatactaaaacaccctaaaagagaaattagttgcattataaacgaacggaactaatatgccagcttagtagcatgtacaggcaggccttgatgggtaacagattgtccagtacagctgatgtcaatttggtgaatttgttttcttcgaggaaatagatccaaggaaactatttgaatatagagatcattcattgcaaaatgaaagaattcgtaatttgtttgaaatccaaacaacgcctcatttactagcatgacaaactgaaagaccaacatcattttcctttctgatcattcttagtacagtagtgttgttcaactgtttctcccgttgtcccacaagttgcattaattgtccgatttccattgagatggtttagtacttgtttccattcatcttgtgcttatgtgcagttgaatggaattactaatgttataattatttgctatattcgatgagctgtgttattctttgagatcttaattgatcagttgacagttacattcgtgtgtgtcggcgtagctaatttttaaccagaagtaatcatgcggttattacttaaataattcatacacacactgtagttctgaaaagaaggtagattaggcctgtctcatctggttccagtttttctctgcaatctgtactgcaactttgctagtggcaacggggccaagtgttttcaactaaaatatttatcagtgggcacatagaaacatgatcacggccaagcagaagtcattgccacgcatttgttgtcctaccaagctagtgtcccgtttgtgaatgtcagtttcattgctagctgaacatatgtgaaagttagttttgctgaacagcaaaaaattcacaaattgcttcttgtaaatttacaccttcgttttctagagatactggtttcagtactttctgctgccaatgacctggtttgtcggtcagaaaccagttttcaggactgaagcatgttacatcagatgtcaacgtcttcttaggctggtgaaagttcttgagattatcgcaatatacactactaatggcattatcatgctctaattaatcacaactttgtacgaccaaccgaaataaaaaagaaggtatctagatctgctgctactgcaacagtgtcggtggtgcttgcagcgaatgagacactgagacaggctgtacccagtgggctggtggttgggtggattactcatgtgttgcttacttgtttaatgtatatacttgcatgattgcatttggacttatatgaggtgaaatggattttagcgcagcataataaaaaacataaagttagttatacagtgcataacttggcacggtatatgacctgcgggtcatgcttttcgacgggctttgtacatgcatgaccgaactttgttgatgcctaatagtctaagtctgaactctgaaccatataacataactctgactctatgatcacttagtgtctccagaactgaaactgtcggccactaacattgcttgcacatttgatagggttccaagtatgccactccctgggtggcggcactggttctggcatgggcacgctgctcatttccaagatccgggaggagtacccggaccgcatgatgctcaccttctccgtgttcccgtcgcccaaggtgtccgacaccgtcgtggagccctacaacgccacgctgtccgtgcaccagctcgtggagaacgccgacgagtgcatggtccttgacaacgaggcgctctatgatatttgcttccgcaccctcaagctcaccaacccttcatgtaagcattatctcgttcgctttcatgcatgctgccaaattgccaacgcgcaaacaattgccaacggatgcatttaatccaaatgaatgtgcagttggtgacctgaaccatctgatctcggcgacgatgagcggcgtgacatgctgcctgcggttcccgggccagctgaactcggacctccgcaagctggcggtgaacctgatcccgttcccgcggctgcacttcttcatggtggggttcgccccgctgacgtcccgcggctcgcagcagtaccgcgcgctgacggtgccggagctgacgcagcagatgtgggatgccaagaacatgatgtgcgcggcggacccgcgccacgggcggtacctgacagcgtccgccatgttccggggcaagatgagcaccaaggaggtggacgagcagatgatcaacgtgcagaacaagaactcctcctacttcgtggagtggatccccaacaacgtcaagtccagcgtgtgcgacatcccgcccgtcgggctgcccatggcctccaccttcgtgggcaactccacctccatccaggagatgttccgccgcgtgagcgagcagttcacggccatgttccggcgcaaggctttcttgcactggtacaccagcgagggcatggacgagatggagttcacagaggccgagagcaacatgaacgacctcgttgccgagtaccagcagtaccaggacgccaccgccgaggagtacgaagaggaagagcacgacggcgaggaggagcacgcctgatctggacgccaactcatcggtgcaaagcgtttcagtttcatcgctcctatggtacacaaatcgcgactacgtattcctacaatcctactaccttaagtatgtatattcatgtactgccgtatttgccttactgcttttattagcttgtgtgtgtatctacagtcgtgtgtgttagtgttttctgaaattgtgatatattgccaccgctgtccagattctgtgggtatgtttattcatataattggaatgctctctgttcttgtacgt

SEQ ID NO: 228 - DNA, 3339 bp, Zea mays
  source 1..3339: mol_type = genomic DNA
caataaacacacccacccggtcgctccgctccaccgttccgccctcgaccgcgcgcggagcctcctcaacccttcagacctccgcctcccaccgcttccgtagcctcgcctcgcctcgcctcgcctcgtccttctcctccgtcccaaccatgagggagatcctgcacatccagggcgggcagtgcgggaaccagatcggtgccaagttctgggaggtgatctgcgacgagcacggcatcgaccacacgggcaagtacgccggcgactccgacctccagctcgagcgcatcaacgtctactacaatgaggccggcgggggccggttcgtcccgcgcgccgtgctcatggacctcgagcccggcaccatggactccgtgcgctccggcccctacggccagatcttccgccccgacaacttcgtcttcggccagtccggcgccggcaacaactgggccaagggccactacaccgagggcgccgagctcatcgactccgtgcttgacgtcgtccgcaaggaggccgagaactgcgactgcctccaaggtaccgtcgtcatcgtcgtagatctgtcccttctgttagaaatgctggtaatttcgtcgggatttgggggttgtcagcgtgcggatctagcgcatttctatagttagaatggcatgttgccatgttgtggttcgcggctcgtagatctagccatttgttggcttgcatggaaatctatgtagatctgggcgttttcctccacattttcgtttttcgagtatgcattctatttagagtataataactggctgtgagctggctaaacatggaagagagacagacaggagacagagtagaagagggctataaggctattcgcagtctaatatatcttggcacaatatctaaacttgccatgtcatataaaattacatatgatacaactacctcaatgcatgatattgtagactgcctctttatcctctataaaattttaaatgctagtatacgtgagagtagatatcgtggaccattttgatagttaaagtttcaatgcatgtggtctcgtgttcaagtagtatctcctccaagatataactttattctctttcatcttaactattttgccacatcatcaaaaatgcttacctgacatgtattaaatatttatgatactatgaattgggaatagcctaaactaacagccagcttatacacataaattaaccaataattcttgtgagagagacaagtggactatatattaattgtgaagggctaactattatatatatcggctaaggtaggctggccaacagttggctatattattaaccttgctcttatgcggttcaaactacgcagatcaagcttgttcaattgcagcatgcatagcatttaatttggcatttctgccggcatggttagactttagtggcgtgatccttcgccacaaatttggccaggtgcctgctttggtctttggctctttcgtactactagtaactgcgaaggattcattgagacatttaacttgagaaacgagcttatataactgatgatttatgtatttaactctatagatgttaagctattttctttgctttggctgttctagagttctctgttatttgtgttttgttgtttatgaaaatcgtgcaaatggctgagcccctgtgcacgtgagataaattcatctgtcaggctagtaaagtacttagctacaactcatattggctagcggttacggtaggatatttgcttgtgattcatgttgggtgttccattttgctaggtttgtccttcttggtgtagaaaaattacttttgtctctttcatttatgcttcagcttgccaaattgcatctgaaataatctttaccttttcttctgcaggatttcaggtttgccattcattgggtggaggtactggctcagggatgggcaccctgctcatctccaaaatcagggaagagtacccagataggatgatgctgacgttctcagtttttccatcacccaaggtgtctgatactgtggtagaaccttacaatgccacgctctcagttcatcaacttgttgagaatgctgatgagtgtatggtcctcgacaacgaagctctctacgacatctgcttccgcactctgaagcttgctacacccacttgtaagtttgcattgctacttttgctcagttactgcaaccacagcttcagtatcaatccataatttatttcatactgtatagtattgtggtagtcatcttcgtttgaagtgctgtgacacaaaactttctttgatgtcttgtgatgctgcattgaattacattatatggtccttgtctgtcatagatgcatatttattgcaatcatgtgctacttgattgaattaatttgtatgtcaggcacatgcatctcacaagcattttgtcaccatactatctgttctaaggtttgctttgtgctcctactgtcctgagatgaccatttcatgattccctgccttatttcttgcatttgtttctgccattaagatatgaatctgaatgttgccatttttatgctgttccagtcggtgacctgaaccatctcatctctgcaaccatgagtggtgttacctgctgcctgcggttcccaggccagctgaactcggacctccggaagcttgcggtcaacctgatccccttcccccgcctccatttcttcatggtcggcttcgcgccgctgacgtcaagggggtcccagcagtaccgcgccctgaccgtcccggagctgacccagcagatgtgggacgcgaagaacatgatgtgcgcggctgacccgcggcacgggcgctacctgacggcgtcggccatgttccgcgggaagatgagcaccaaggaggtggacgagcagatgctgaacgtgcagaacaagaactcgtcctacttcgtggagtggatcccgaacaacgtgaagtcgagcgtgtgcgacatcccccccacgggcctggcgatggcgtccacgttcgtcggcaactccacctcgatccaggagatgttccggcgcgtcagcgagcagttcacggccatgttccggcgcaaggccttcctgcactggtacaccggggagggcatggacgagatggagttcaccgaggccgagagcaacatgaacgacctggtggccgagtaccagcagtaccaggacgcgacggcggaagaggaggaggagtacaaggagggagatgaggtggctgcctgatccaccggcacattgtggggttgtgcacattgtggggttgtgttattattgttgctcttcatctggtgtttaaaatgttactgtgatgctgctgcgaaactgacgtaagttttaact

SEQ ID NO: 229 - DNA, 3138 bp, Zea mays
  source 1..3138: mol_type = genomic DNA
ctccgcccgcatacccgatcccgctcgctcgccgccagttgtcccgcagctcggatcgtctcatacctcgtaagcacttctaaactgccctcgtagtcgagttttggatctgtgctgcggcacagcatcacttgtaatatgttagggcacctttgttgggatgtttgccaagttctggattgtttttttttcgcgatgtaaccggcaatgcgactggatctgctgattttggacctgggaatgtcctggtccagtgcttggttatctctattttgcaacgaagattattagatcggtttggtggttctgcgtacttgagtgggatctctagtgtcggatctgggggaaatttcgtggtccttttatttttacgacactcgacctcggagactaatcactcggtttcggaaatgtgactgttagacctttgcgtgtttatcatcatagcttggtacagtattggactacaaatttcaggactgaaaactagatctggaactgacatccccccccccccccccccaccatatagaagatttagttcatgaaattatttataatcacgaggaaatatcgattcgatatgctataaatatggatgcatttagtactcagtaggcgattcagtgattgatgtgtgtaagacggtttttggaaccccatatattgttgggttctatgtggtccgcgcaggagttcagtgacatttcggatctgaacagcagtgacaatgtgagcttgctttctggctcagtggtaaatgcctatacatccatgatctaatcaacctgagggagggtactgacagtagtaggcgtttttttagtattttaagtttgagtgcttgctgcagtatctaaaactaattcctatgcgcttcccttgtttctagggcgaaaatgagagagatcttgcacatccagggagggcaatgtggcaaccagatcggtgccaagttctgggaggtcgtgtgtgacgaacacggcattgacactacaggtcggtacactggcacttctgaccttcagttggagcgcgtcaatgtctactacaatgaggcctcctgtggccgctttgtgccccgtgctgttctcatggacctagagcctgggacaatggacagtgtccgcactggaccctatgggcagatcttccgccctgacaactttgtgtttgggcaatctggtgctggcaacaactgggcgaaggggcattatactgagggcgctgagctcattgactctgttctcgatgttgtgaggaaggaagccgagaactgtgactgcttgcaaggtacttgagcttgttgatgttaagctgattgcttatagttgctagaaatatctgttgcctgtgcttttttcactatgatgcaatacattgtatttattcatttgattgatgccatccatgggactagaactataatatcttgttattatgaacctgcccttgctctgaaacctaagccatttcactcgttttagttcatgtcttatatttctgcattatacgtcgatgccattggtacttattggttattgctgattgcttagtaattttacatttgagtatctatcttgtatgctgttgtcattttttgacacaccaccagaaacattttttctattcaatttataccaaagtttagtatttcccttgcacttgttgcttgaacaattgccatacacaaaaagctgttctgactgtgattactaaatcacctatgtgtttcatgtattttggttgccattcttttccaatcacccaagatactaagcttaattatcatgcatttagcactaactcggtctatttgtttcttcaggattccaagtatgccactcccttggtggcggtactggatctggtatgggtacgctgttgatctcaaagatcagggaggagtaccctgaccgcatgatgctgacattctcagttttcccctcaccgaaagtatctgatactgtggttgagccatacaacgccactctttctgtccaccagttggttgagaacgctgatgagtgtatggttcttgacaacgaggccctctacgacatttgcttcaggactcttaagttgaccacccctagctgtaagcagactctttctttctcaattttatctgttcagcattgcagatatttccctgcttgtactagtgtattactgtgtgttttaacactgtgtatttgttatttcctgcagttggtgatttgaaccatttgatctctgcaaccatgagtggagtcacctgctgcctaaggttccctggtcagctgaactccgacctcaggaagctggcagtgaacctaatccccttcccccgcctccacttcttcatggttggcttcgcgccgctgacgtcccgtggctcccagcagtaccgagcactcaccgtccccgagctcacgcagcagatgtgggacgccaagaacatgatgtgcgccgctgaccctcgccacgggcgttacctcaccgcctcggccatgttccgcgggaagatgagcaccaaggaggtcgacgagcagatgatcaacgtgcagaacaagaactcgtcctacttcgtggagtggatccccaacaacgtgaagtccagcgtgtgtgacatcccgccgaggggcctgtccatggcgtccaccttcgtcggcaactcaacttccatccaggagatgttccggagggtgagcgagcagttcactgccatgttcaggaggaaggctttcttgcactggtacacgggcgagggcatggacgagatggagttcaccgaggccgagagcaatatgaatgacctcgtgtcggagtaccagcagtaccaggatgcgactgctgatgacgatgaggaggccgagtatgaggacgaggaggagccagctgatggcatgtgaggggaggctgttaaatgtgaagcctggtgatgtcccctttcgtgttgtcgccatgttatactagtacactagcataccaccctcgtggcccattccgtcgatcgtggctgttgatgcttgtgtttccttgttctatagaaccttgcttttggtacggagctgcaatgtggattcgatccttccgtatcgctacttatgctgcgctaatttgctgaaatcaaaatctccagagctatgttgacct

SEQ ID NO: 230 - DNA, 1987 bp, Zea mays
  source 1..1987: mol_type = genomic DNA
tccaaaatttcaaaattcaaattcgctctccgctcctccgttgacgggacgccgtattttcccctccctcccgtcgcgcacttgcttgcctgccgttactactactggtagtataaagcaaaggcaaaggcaaaggcaaacccctccccacaaaccctaacactccaccgacgcccagatctgttccttctctcttccacgccgccgccgccctcgaattttcgaatcctcagcaacaatcgtcctgccgccatgagggagatcctccacatccagggcggccagtgcggcaaccagatcggtgccaagttctgggaggtggtgtgcgcggagcacggcatcgacgccaccggccgctacggcggcgactccgacctgcagcttgagcgcgtcaacgtctactacaacgaggcctcgtgcggccgcttcgtgccccgcgccgtgctcatggacctagagcccggcaccatggactccgtgcgctccggtccctacggccacatcttccgccccgacaacttcgtcttcggtcagtccggggccgggaacaactgggccaagggccactacaccgagggagccgagctcatcgactccgtgctcgacgtggtgcgaaaggaggccgagaactgcgactgcctgcaaggttggttggttatttgcttgtctcgtctcgtcttccatttctgcaaggttgcttggtttgctgactgggatcttatgcccgcctgtcaggcttccaggtctgccactctctcggcggcggcaccggctccggcatgggcacgctgctcatctccaagatccgcgaggagtaccccgaccgtatgatgctcaccttctccgtgttcccgtcgcccaaggtctccgacaccgtggtggagccctacaacgcgacgctgtccgtccaccaactggtggagaacgccgacgagtgcatggtgctcgacaacgaggcgctctacgacatctgcttccgcacgctcaagctcaccacacccagcttcggcgacctcaaccacctcatctccgccaccatgagcggcgtcacctgctgcctccgcttcccggggcagctcaactcggacctccgcaagctggccgtcaacctgatcccgttcccgcgcctgcacttcttcatggtggggttcgcgccgctcacctccaggggctcccagcagtaccgcgccctgacggtgccggagcttacccagcagatgtgggacgccaagaacatgatgtgcgccgcggacccgcgccacggccggtacctgacggcgtccgccatgttccgcggcaagatgagcaccaaggaggtggacgagcagatgctgaacgtgcagaacaagaactcctcctacttcgtggagtggatccccaacaacgtcaagtcgacggtgtgcgacatcccgcccacggggctgaagatggcgtccaccttcatcggcaactccacctccatccaggagatgttccggcgcgtgagcgagcagttcaccgccatgttccgcaggaaggccttcttgcactggtacacgggggagggcatggacgagatggagttcaccgaggccgagagcaacatgaacgacctcgtgtccgagtaccagcagtaccaggacgccaccgccgacgaggagggcgagtacgaggacgaggaggagggagatctccaggactagaataggctgcttcacattcagtcaccgtcagtctatgaaaaactaatcatttgctgcttttcgtcgtcgtcgtagtagtagtaggtcggtaatcatctgtcgtgggtgtgtttcgtttctatcattaatcaggattagtagtagctgctgctgctgcgggcacaacacaaggggggataggaactgcaataccctgttgcgctttggttgtttcttggaaccgatgttatgttaaattctcaacgctcagtgtctgaacactatttgctcatgtttctggaactgctgttgtgttaaattctcaa

SEQ ID NO: 231 - DNA, 25085 bp, Zea mays
  source 1..25085: mol_type = genomic DNA
cacgcttcgtttgcttcccgctcccaccgccaccacccaccaatcgcactcgcagttggcgcgcgctcccgtcctaaccaagcaaaacccacaaccctagcctccgccggcgccgccatctgccgggcctccctccggtcccggccgaccgtagcctcgcagcaccctaaccctatccctcccccgctgccgcgggagcagggtaaaaaaatgccgcgtgagatcatcacgatccaggtggggcaatgtggaaaccagatcgggatggagttctggaagcagctctgtctcgagcacggtatcggcaaggacggcctgctcgaggacttcgccactcaggtacgtccgcgcccccattccctctctccccggtcctcgtctaagtgagcatgacctgttcgagagctcctcccctcacgcgctggccgcggtgaatcgattgatggcggtttccgggttgctcgaggtcagcaccgcttgtgctctgatctgtgctgtttgtggatatgtcggcgaggtcaagtggcttgtcttcggacctctgctgcaggtttcctacaagtagaattcgcacaagccatgcttaggtccccgtgagaattttggagatttcatttggcattggtggatgggcactgaattttgtttttcctcaagtgtaaacacgtttttcccagtcaacagggattagtgtttaaatgttattggcctatagcattgtatttagctggaattaacgatatacaagaaattgaaggaactgtttgatacttacaacacccatgtatcatgttcctcattatgctggaaattgtttatgcgaactaactgtgcagcccttaaaaacatccactgtaacacttatgccgcgtctgtagtggatgaatgcagtatttgccatttctgtttatctggggtatattggtggctaaattaaacaagagccagctctaattagttacctgcaggggggcgacaggaaggacgtcttcttttaccaggctgatgatcagcacttcatacccaggtctctgcttattgacctggagccgagagtgatcaatggaatccagaacagtgagtacaggaacctgtacaaccacgagaacatatttgtcgctgagcatggtggtggtgccgggaacaactgggccagtgggtatcatcaggtagagtttctctgtatatctctgcttggacctaatgtttccactggatcaaccaatcttgcaggctttgtagactttcttcttttgtcacttggcgaaatgcttattttcttgttttaggaatacatgttcaaattccttttcatattctcatagggtgaacaagttgttgatgatatcatggacatggttgacagagaagcagatggaagtgatagccttgagggttttgtcctttgtcattctattgctggtggaactggttcaggttggctatctggctttaatttcgtggtgactaccatctgattcactgtacattggatattgctttgttattataaaacactaaaacagattttctcctaccatttgtctaattgtcgtgtttcccatgttcattcaggtatgggttcttatctgttggagacactgaatgatcgatacagtaaaaagcttgtgcagacatatagtgttttcccaaatcagatggaaacaagtgatgttgtcgtccaaccttacaactcacttttaactctgaagcgtctgacactgaatgctgactgtgtggtggttcttgacaatacggctcttaataggattgcggtcgagcgtcttcatttatcaaatcctacatttgcacaaacaaactctttggtctccacagttatgtctgcaagcacaactacattgcggtatcctggatatatgaacaatgatctggttggccttcttgcctccctgatccccactccaaggtgtcattttttgatgacaggctatactccactgactgttgagcgccaggtgacttaatgttctctttcccagttgttacattggttcatgtagcattttttatatcgttgtattctttgtggaatctttagttacttgtgcttgttcattgactgcaatttgggacacttcgacagaagaattagtgaaagtagttaaattgttgtttgttttgggcgctgaactgttcagttcataatatattggatctgctatgtggcaggttaacatgatacgcaaaacaacagtattggatgttatgagaagacttctgcaggtattacctgtctctataggaagggtggttaactcttaagtcttcatgaagtttgaatcctttattatgaaatattgcagacaaagaatgtaatggtgtcatcatatgctcgaacaaaagaagccagccaggctaaatatatctccatattgaacatcattcaaggggaggtggaccctacacaggtacagttttgtcagatgacccccccccccccccccccccagtgtggatatatattggtcaaatcaaatgatggcaccatggaataagctttgccaaatgctgaagtgtaatgacttaggagttacatacatggaatggtcatctgaaataagaatccacgataaaacatagtagtgtacaggaagttactggagatatgaaagtttaacctgtgttgtttccttgatacatcaaacaaagcacatttgtatccacctttctccttatacactcctatatggcctgataggctgaaacaacatgaacttttactacaaatctgtaaatggatttttgtaaatactagcatggtggcatgttatttgttagtcaataacttttagttggagtaaaatactgtttaatatttttccttttttgtaccatgaaattatttgtttgttgtcttattttatttggtcttgccatgtatttaggttcatgagagcctgcaaaggatacgtgaaaggaagcttgttaactttatagactgggcacctgcaagcattcaggttatcctttctttttgtaaccattcaggtctttgttcgattgtctggcattaaaatttgtaagcatttcaactgcaacaggttgccctgtcaagaaaatccccatatgttcaaacaacccacagggtaaaatgatctcttcctcctaccttccctccatctttggtgggatttcagtcttttatttatttgaaaaaatggataatgctgtatcaagtgatgctgtgctacaggttagtggtctgatgttagctaatcatacgagcatccgccacctgttcggcaaatgcctgggacaatatgaaaagctaaggaaaaagcaggcttttcttgacaactataggaaattcccaatgtttgcagtaagaacatttttcagcaagttttaaattttctagttcatttatttgaatagtttagtgtacatgcatattttgctgtttacatagttggctgtttggtcatgtattctatacgctgtttagttggtgtggtcaagttcaggaacctttctgatgccaatcaactaaaactctaatcttgcagctgcaaagaaatttagataccgtgtcattgttacttaggctgattgctcacatgtttctttagataaaatgacatgcatatgcaattattttttcttgagaacaaacaccaacagtgtttttaaagcgtaaggtgaggcaagccgttggaccaccgcctggacgccttaaaaacactgaacaacagtactgtcaactatgtacaaccttgtggacggcttcattcttttgtgagacatactgatctctgacctcttcgtgcaggataatgatctctctgaatttgatgaatctcgagagataatagagagcctagttgatgaatacaaggcctgtgagtcgccagactacattaaatggggaatggaggtaagtttaatgaagtttaaatgttgttctttgcgctatataaaatgctgagcaatctgttccaaagcaggaccctggagaggcaaacgttgcagcagatcttgactctaagttggtagtgtaaatataaaggtaccatttcatgaatcatgatcaggcactttatatgcggaaacaatttgatgtcctatcatattgattattgattgaattgacaatccacttgaacaccactctttcttttgatagccatgtggactacatcaattattataaatgatccacaatctctgctacatgttgaaaatgattgctaaatccctgggcatatcttttgttagagtacctgtctagggttttggggttagccccttgtaattattgtcacacccttgtgtaatgagccaggcccaacatctattgatatatataccagcaccaaccctagttaggattagggtttcccattccaatttggtatctgaaccgattcctctcttctcccttccatctccctccccatagccaccggcgtcgttggctcttggcttgtcgctggccgttcctctcctccctcatcggctcccacgagctcctgcgcctcagccccgtcggatccgcgtccgtggtgcgcgagcgccgccgaccggtgccgtcagaccaagctttccgcacgctccctccacgctggtcgccgccatctccggtcgacctcccttgcgtggcccgccgccggctgcctccatttgccctcccctgtgcggctcgcccctatccgtccgtctctccggcgggtccttcatgcgcgcctaagacagccgcgggggggggggggggggtgcgtcctcctccttgcgtggccggtcggcctccatctgccctcggtcgccctcctctctggcaggtccttcctactcgcctaggacgcgccccccacctaggacgcatcgaccggggggttgcgtcctcccagcgccctgcacgggctctccttcgacgcgccgccgtccctcctgccatgggctcggtcacgttgttggaccaccatctccatcctactattgaccccctcaccagcatcctcgtgtctccctctccacctcttggcccctcggtccagcatcctctccccgtgctacccttcaacagcagcgcgacctctacctgtcgcggtggcgtgaccccctttccctctacccttctaccgtacgtcgtggctcccggcacctcctacgatatcccaccacccttggtgcctccagcttcgcccagtttcgccgtagtcgctgcgtgtcctccttcacgatggccaccttgtccaagtatttttgtgtccttcgatcaggccatgaaccgtgttcttcgtgaccgcgtcgagctccacccccaggccgaccgtcatgtacccgaacccattgtcttcctccatgctgcaatcgcctccctggcaattgagcctccgttgtccccctgctctcctagtggccctgtcggagcacctgccctggccctttccgcgcgcctcgtggcctcaccaccctctccctctctcaccgactgggtggtcgactccggatcctccttctacaccactcccacagctagctcgttattccaccatcatccaccacacccctcacatcctccatcgttgtgggcaacagttccaccctcccggtcacctcaatacgtgcatcggttctttcgggaccattctatcttaatgacgtccttgttgctcctggtttgactcatctccttctctcggttcgtcatttcactagtgtcaaccattgttctatggagttcgatccctggggctcaccatacgccttcccacgcgtgctgtgctcgctcactgtgatagctccgaccccctctactctcttcacttgccctccacttcccccaccagcgtagcctcatcacgtactcctgctactaccaccacatcacatgctcttgctactaccaccacctccgtcgtttggtatagtcgcctcgggcaccctggacctaacgtgatgtcctggctttccagccgcttagacatctcctatacccgaggctcctctgagcgcctctgtcatgcttgtcagctcggccagcaccctcgtcttcctttttccacttccacgtccagggctgtttaggcctttgatcttgtccactgtgatctctggacttctcctgtcctcagcctctctggtcacaaatactatctagtcattctggacgactactcccattttctttggactttcactcttcggctgaagtctgacacgttcaccgccctcacccaattctttgcctgggtctccacctagttccattgtccggtccatgccctccagtgtgataatggccatgagttcgacaacaacgcctctcgatccttcttcgtcacccatggcgtccagttgtgtctctcgtgcccctacacctctctccagaacggccgaaccgaacgcatcattcgcaccaccaacatgatccgctgccttctcttccaggcgtctctccctgccagccactgggcagaggccatgcacaccgctacacatctcctcaaccgtctcccctcggaagtggtgagccaccccactccccactttgccatgtatggcacaacccccctcctatgaccaccttcgtgtgttcggttgtgcctgctatcccaacacttccaccatcgctccccataagctatctcctcacttcagtcgcttcctcttcctcggttactcccctgaccacaaggggtatcgctgtcttgacctcggcacccatcacatactcatgtgttccgccttgttggctcctccccacccaccgatctcgactctttttgagtcggatccggttccacctccaccccaggcacatcgccttgcgtcattccccgcgccaagcgcaacgtcgacgcctttgctcgtgcctctatccatgccacgtgcggtctcgacgcctccgcccgcgcctcttcctgcaccacgcgcgtccccgtcgatcccgcatgcgccacacgcggccctgtcaacccctcccacgccatgcacggttcgcttcgccgacccgcccttgtctaccaatgccgcgggcgggccactccctcggctcctgctgacccggccccgtcgacgagcgcagcttgcttcgccgaccccgcgcttgtctaccaccatcgcgagcgggccactccctcggctcttgatgccccgctggctcgaattgagcctcccgtgtaccacctggtcgccatccaccgcgactctgagcatgtccacccgatggtgattcgttgcacagccggcgttctctggcccgtcgactcgctgatcctagcggctgccacgaatgccattccatcggacgcctccccggtccctccgttcgcgccgccctcgtcgacccccactggcgtcacgctatggaggagtacgcggccctgctggccaaccacacctgggacctgatgccatgtccaccaggcactaacgtggtcaccgacaagtggctctttcgccacaagctgacctcggatagctccctcgatcgctacaaggctcgttgggttcttcgggccttcacctagcaccccgaagtggaatatatgacgagaccttcaatgacgtcattaagtttgccaccgttcgagccatccgctccctcgccatctcccgcgactaggcgatccatcagctcaacgtctagaatgccttcctccacgacactccgataaagactatctactacagccagcccaccggctttgtcgatgtcgctcgtccggatctggtttaccggctgaaccgctccctgtacagcccaaggtttacaaaaccgtttcagatgtaaaaaccgccccccaccggtaacggtttaccatcggtaaaccggtgaaaaccggtaaaaaccgaccggtttggccaaaccaaatcattttgaattcaaactggtttaccagcgaaaaaccggtgaaaaaccggcgaaaaaccggtagaaaccgccggttaaccacgaaacaaactggtttttattatttttttgcagaaaaattgaaaattttgttagaatttatttgtagtttgctcaattcacattgtacagtaaatattaattgatctacacaacatgcattcaccaaaaaaacatataatatatatatatgcaaccacaaactccagttctcatgtaataaacaaccagcgaacttcgcatactcaaatacaagttcttttacacctctccaacgaggcaacgacacataggtcgacttatttcacaatactcacatgttcacctcgagtcatagtgatagtacttaagcatgttggaagggtcgtgatattgtttcaatccatcatagtgatagtgataggtctatacaaaagatacgagatacattagcgagaaaataagaacgacaaataaatacttatccataaagcaaaacaacataccggtatgtatgtttggtgtttgtgtattgcacgtgcacctcaccaagtgttgaacttttctcctgatcagcaaatcttaggaacacatacagaagaactggagctaagagttctagctagattgagtattgtctagacggatacttattagaagaactgaagctacttgatccacagattccatcttggacaggaaatgtaaccgaaattgaccactaaatgtctaaacttgacttgagctaccggtttcatcttcaagcaaatcttaggaacacatacagaagaattggagctaagagttctagctagattgagtattgtccagacggatacttattagaagaactgaagctacttgatccacggattcaatcttggacaggaaatgtaaccgaaattgaccactaaatgtctaaacttgacttgagctactggtttcatcttcaagcaaatcttaggaacacatacagaagaattggagctaagagttctagctagattgagtattgtccagacggatacttattagaagaactgaagctacttgatccacggatttcatcttggacaggaaatgtaaccgaaattgaccactaaatttctaaacttgacttgagctacgggtttcatcttcaagcaaatcttaggaacacatacagaagaactggagctaagagttctagctagattgagtattgtccagacggatacttattagaagaactgaagctacttgatccacggattccatcttggacaggaaatgtaaccgaaattgaccactaaatgtctaaacttgacttgagctacgagtttcatcttcacatatagcatataacatctccacatataacatataacattaaacaagactagtatacctaaattgaccactaaatactcaatcgtggcattaaattcgggtttccggcaaaaattggcggtttaccgatctaaaataacggtttaccggtcccaaaaaacggtttaccgacggtttccggtttttatgaattttttcaaatttttcaaatttggaacgaattttgaaaaaaaaccggtggttaaccgaaaccgcaccccagcggtttcggtaaaccgaccggtttaccgccggtttttaccggttttgtaaaccgtggtacagcctcaaataggcgtcacatgtgtggtacagtcgcttcgcctcctacttggcctccatcaacttcgtcgaggccaagtcagacatgtctgtgttcatctaccgacgcgacgacgacaccgtctacctcctgctctacgtcgacgacattgtgctcacgacatccacccctgaccttcaacagcgcacgatcgtcgcccttcagcgggagttcatgatggacctgtagccccttcaccacttcctcggcatcaccgccgagcgccggcctcaaggtctcttcctccaccagcgcaagtacacaatcgacatcctggagcgggctcgcatgtgcgactgcaacacgcctgtcgacactcaggcgaagctctctgaggacggcgggccctcggtcgccgacacgacgtactaccggagcctggccggcgcgctccggtacttgtccttctccaggtccgtcattgcctacgccgtctagcaggtgtgcttgcacatgcacacctcgcgggagccccatctcatctctctcaagcggaccttgcgctatctccgtggctccctcgactacgaccttctactccgatcctccccgacgtcggagctcgtagtctacacctttgctgattgtgctagctatcctgacacgcgccggtccacccgatttttttttgcattttagtcctttctcgggaaaaaatcacgtttagaccctagaaaattttaatgtcatttttggaccctttgctcgccgccgtagcctatggcgccgaggtaacacagcttggcgccataggctatggcgccgaggtacgtgctgcgctggcacaaacggacgtcgtggcgccgacatggcaccgagctcggcgccatagatcttggcgccgagctcagttgtgtacacaaaacctgtttagctcagtcggtaaagcacaaggctcttaaccttgtggttgtgggttcgagccacacggtggttgtatttttttaatactttttgtctttgtcactggtttgttttttttgttgtccagatttttcgtttatgtcgctgattttccgtccagatttatttctcatccgaataaaaagaatctggacgaatacaaatcagtcacaaaaacaaaaaaatctggttgagaaataaatctggacggacaaatcagcgacataaacgaaaaatctggacaacaaaaaaataaataaataagtgacaaagacaaaaagtattaaaaacgcccaccgtggggctcgaacccacgaccacaaggttaagagccttgtattttactgactgagctcggcgccatagatcttggcgccgagctcggtgccacgtcggcgccacgacgtctgtttgtgccagcgcagcatgtacctcggcgccatagcctatggcgccgagctgtgttacctcggcgccataggctacgacgccgagcaaagggtccaaaaatgacagtaaaattttctagggtccaaacttgatttttttacgagaaagggccaaaatgcaaaaaattcggccggtccacttccggttatgccgtgttcctggccgccaagcggcagcctgtcgtatctcgctccagcgcagaggccgagtaccacgctgtggccaacagcgtggcagagacctcctggttgcgccagcttctccaggagcaacatagcctcttcagcgcgccaccctcgtctattgcgacaacgtcagtgcggttcacctctctactaatctcgtgcagcatcagcgcacgaagcacgtggagattgacctgcactttgttcgcgagcgtgtcgcttccggtggcgtttgggtcctcagcgtccccaccatgctacagttcatcgatatcttcaccaaagggttaccgtcgggtgtattcaccgatttttaatctaatctcaatatctgtacatgatagagttgcgactaggggggagtgttagaatacccatctagggttttgggattaaccccttgtaattactgtcacacccttgtgtaatgggtcaggctcaacatctattgatatatatatagcagtcccaactctaattagacttaaggtttcccattccaactttctatatattgctggcaaataacggctagacaaggctttacttttcttttgaaggaactgtaatgttctctcagtactgagaaattcttagacaatgctcctttagaagcagacagtggcggagctccttaaaaataacgccccgggccactttacaaatataacgatgtactactcgtcttttagtttttcgcactttaggggtagtaacatttaaaacaatccaatggaacttttaatttttcgcactttaggggtagtaacatttaaaacaatcaatggaactgtggcagatagagaaaaagaatcaaacgttcgacaacaattactcacaatagaggagaaacactcagcacacatcgcttgccgctcaggtggtcgctgccaattggccagggaggcgctccgccctcgcctatgaataagaaaagaaaaggaatcaggttgaggaagttgtatagtttgggagaaggtgtaatggcaggggtagatttgggcggtggcgcggcgccagtgcaggccgcgtgcgtcattgctacagggacgctagaggcgaattggtggaggtggaggccggactggcggtggcggatgcctgagttagagctcacccggccgcctcggaggttgttgccttgtgcccttgcagaattcgtagagccttaaggcgtggagagcgatagagggctgaatggaggcggtcgcgccactagcaacataggaaacgcagccgcacaggtttgcgaaataattgaaagagtctatgttctcgtgacttgagcgacttagggagaccgccagcgccaggctcaatcagtgcaagcaggaggtcttttgggccacatttttagactaaaatgtattttggtctagattttttggttgaaaaaagacatatatatataagaggattttgggctgcgccccgggccacggcccaggtggcccggggcccatatccgcccctggaagcagataattatggtgccctaattctcgtatactgactatgtttatgaattcgataattttggaatctgcactattccagcaaatcgcacaactgaggaaggctctctacatgcgaccctgtgttggtcattcaaagatgctactgtcactatctagtagtcttcaggttgacgcaacctgcttatctagatcatatcggagtgccgccaaagcgggttatgaagttattcgacctcaaagtttgtcttagtctgctatgtatattttgaaacccacttcctcttgtctgtgcatttccccttcaatgtcttgtgactgcactctttggcggttgatggtgaggtcttccatgccctttgagacattgatgctgatagtttcagttgtgccgagcgttgcttgctgatgacttaggggggtgtttggttgctcctgaagtttagcccgggtcacatcaagcgtttgacttttaaataggagtatgaaatatagacctaaccaactggactagattcgtctcgtcttttaatcttcggctgacaaattagttttataatccgactacatttaatacccggaacggaggttcaaacattcgatgggacaagggctaaattttagtttggggtaaccaaacacccccttagaaagttttacttaaatctagaagtatgaaggtggaatcttttctggcaatgtttctgtttgctgggtttgtaaacatgaagtgttttccccgaaccgagcatttggtgtattaacgagggacatggtcacctagaagtatgaaggtggaatggttccatcagcttgtggatatgtaaggggtattggtttggggaattactccatccaaaatgatgtggagctataggtgtacatttgggccgggcctgatgggccggcccgaagcacggtaaaaaaagcacggcccagacacggtacgacacgaaatattttagtgccgggccggtacggcccgatatatcgggccgggtttgggccgaggtcacggcccttgggcgggcacgagcatgacccgtttaaggcagacacgaaatggcccatatagaggcacgaaaaggcccatatatttattaaaatcacacttcattctacactttcatgtacttgttaaaaacacaaagctatagataattttagttagatgctttttgtagctttgaattagagtatgtgatgtaattttatttttgttatgaacattagataataaactgaacttacgaactttatttagagctgattatactctttttctttctaacaaaatgatttgtaaacgaggtagtcattgcatagctctagtaacttaatacaaatattaagtttgcttttggtcaaatttatttgtcttatcttttatttgtttattaaatttgttttgaatttcgggctctgatgtgaatttcgggccctgatgtgaatttcgggccaaaaactgcatttcgggccaaaaattgaatttcgggccctaatgtgaatttcgggcttttataatttcgggccgcccgaaatgagcccgacacgtttaagcaattacgagacgggccgtgggctaggcccatgggccggcccggtacgacccgaaaatcaaacgggccgggccggcccgaaattcaaacaatacgtgctttttcgggcttgggccgggccgggccgggcggcccgaatgtacacctatatgtggagcattatgagtctattctttaaatttggtgggatgacctcattcctcatattagtgttaactaactaactatgaggaatgagatagtgatggatcaactcattcaattccacaaaccaaacaaaaaaagtgaggagcgaaaagatggactagctcattcatcaaaccaaacaccctgtaagagtattgattcccatcggctagtgattaatgtaatcaagtgttttgtgacaacaactttgtgtaattttgttactaccatgtgttctcagctccagctaggtgatcagatatcagcaaatctcaggtgatcgtataaaatactgttttgtactatagataacactatttgtagtttagagtttgaaatagagacgagacatgaaatagaataggagagctgtcggagatagcttaaggacaagctgatgctgctcttgttttatgtttttatggtggactaaaaaattactcttgattgttaggtttgaagaaaattttttgtagagattaaaagattttaggtgggtccactatgttatgaaattttggccgagtgaagttgcatgtagttgtgtgtgctttatgtttatgttagttagctagaaatttgtgctctatgtttaggatagttatttagaaatttaagttgacatgtttaggtttatgttaaatttggttagtatgtgtaggttttagtttgttgctgtaagtaaaatggatttgctaatagtgttttaatgtttgatgatcaacacaacaatttagactaacattgtttggcatgtttcacaaggtctgtctttcttaaaacagacatctgatagtcttaacacatgttctccctttataagcttatgaaggtttttcataccaacatgtgctagacgacgatgctagagccagctcatgctagtcttagcaagtaaacatgcatctagatcgacattatctttagtaaaatctactaagtaaagcttgctatcagatacacctttaaatgcaaattaactatcacttcttctaaagatagttacatcaacatttgtaaatagacaattatatcccatatgacataactggctgacagaaagaaaattatatcccagcgattctaccaaaaagacattagaaatgaaatgctcggtagtaatcgctattttacttatcccctttaccttgcctttcacatctccaaagatgatggtctcatgggaatcctacgtaggaggtgaacatcttctccccgtcatgtggtttgtgtatttgctatcaatgatccaggttgagcccccagatgcatagacctgcaaggaatttaggcttgggttttaggtccccaacttgtgttgagtcctgttaggtttgttacataagattttaggacccaaatgcaagtattacctctcttgtattatggtctcacattggtagcaacaattttatcattcttacgataaattacataggaatcatcaaaagtttgaaacaaaatagaaggaccatgagatgcatttctatccttaggcgtgtgagaatcaacatgagatgcacgatgcctaggtctactcctatgagcataagaaccaatagatgaagcaatcatagtgcgaggagcaaaaaaagcatcatgacacgtatgtaaaacatgatcaatacatgcatcatgatgaacactatgagcattatgagaaacattcttaacatgagaatataaataagcatggttcttattttcatgaaaagaatgtgaactactagccatagtcgcctttcctttctctctagtgaagttgggggctttttgactcttttttttcttggttcccttttgtaaaccaagtctaactttaacggagggatgtctaccaatggtgtaggcatacctagcaaacttaatcttatcacatttatctttacaatttttaagttgagcatgaagtttagcaatattatcattcaacatgaaaacagtagaggcatgatcattgcaaacattgacatcaaaatgcttacatctattgcaaatggatatatgcttcaaagatgaacttgtaacacttaacttttctgttttagcatttaaatcgacatttaaactcttaaggctataaatcgaagtatggcaagaagataactcaaaagcaagcatttcattcttctatatttctaacacatgtgattttttcgcttctacaactttatcatgtttctcataaagtaatcttattgtttttgtagttgtcggggaccataattaggggtacccccaagactcctaaacttggttggtaaccaccatcaacacaaagctgcaaaggcctgatgggcgcaatacaggtcaaagctccatccactcaagggacacgatctcgcctcgcccgagcccagcctcgggcaggaacaacagacccatgtggattcatgtctcgcccgagggtctcctcaagcaacgggcgcaccttcgactcgcctgaggcccagctcgggcaggcttcgcggagaagcaaccttgaccagatcgcctcgccaaccgaccgtatcgcaggagcattcaatgcaaggatcgtctgacaccttatcctgacgcgcgttcttcagtcgacagggccgaagtgaccgcagtcatttcgcccctccactgactgacctgacaggaaaatagcgccgcctgccctgccccgactgctgtgccacccgccagggtgaggctgacagcagccaagtccagccttaggcgccataggaagctccgcctcgcccgaccccagggctcggcccccgcctcggcctcggaagtcggtatccgcctcgcccgaccccagggctcggactcaacctcaaccctggaagacggtctccgcctcgcccgaccccagggctcggactcaacctcgacctcggaagacggtctccgcctcgcccgaccccagggctcggactcagcctcgacctcggaggagtcatcgcctcgctcaaccttgggctcggaccgaccacgttacaggggggcccatcattaccctacccctagctagctcaggctacggggaacaagaccggcgtcccatctggctcgccccggtaaacaggtaatgatggcaccccgcgtgctcccatgacgaaaggagacgtcagcaaggacccgacagcctcgacatctgtgcttctacagggctcaagcgctccttcgacgaccacgacatcacatgaacagtgcaccaacacctctccaacagccacgtcggcatgtacatagggctctgactcctctctgctagacacgttagcacattgctacactcctcattgtacacctggaccctctccttacatctataaaaggaagctccagggccctcgtacgaaaaggtggccgcgcgggagaacgggctgacggacaggctctcgctctctctctctccctcgcgaacgcttgtaaccccctactgcaagcgcatccgccctgggcgcaggacaacacgagccgcagttccctcttttgttcccccatgtgttccgtctcgtgccgacccatctgggctgggacacgcaacgacaatttactcgtcggtctagggaccccccggggtcgaaacgccgacagtagtaatctattcttttcattaagaacattaattaattcattgatattatctactttggatctttctaagcctttaaagagatcactatagtctatgtcatcattcgaaccatcatcactaaagggagtgtacttgggggtatcatgagagcgtaccttcttctattttgtcatgaagcaagtatgatgctcgttgggaagagggagtacttgttgaaggcagaggcaacaaatccctcatcatcggagtcaaaagaagagcagttcgagccccattcctcatcgatatgcgccttgcccttcttcttatagaacttctccttccatttcttgtcttggtcttggtcattttcattataaggacattgggcaataaaatgactggacttaccacacatgaagcatgaatgatttcccattaatttattcttgttgggttagtccttgcgtcccttcaaagcggttttcaagcgcttgataacaagcaccatctcgtcctcattgagaccttgtcggggagcgcctccttgttggtcgtcgctttgagagcaacgggttgcggctcataatgaggaagaggtccgttgacgatgtcgtcgacgtcgacgtaccttgcttcgtttgccatcatgcatccgctcacaaacttaccaagaatttctttgggcgacattttggtgtacccggggttctcacgaataagatttacaagatgaggatcaataatagtaaatgaccttagcattaagcgcacgacgtcatgatccgtacatcttgttcttccatagcttcggatcttgttcactagggtcttgagcctgttgtatgtgtcggttggctcttcacccctcttcatggcaaacatccccagctcgccttccaccaactccatcttgctggtcattgtgatgtcattcccctcatgagaaatcttgagggtgtcccatatctccttagcgttgtccaagccactaaccttgttatattcatccctacatagagatgctagaagcacattagtagcttgggaatttttatgaatttgcccatgaatatgaatagcatcatcattatcatcatagtgcattccattttctactatgtcccaaatgctgggtggagtgaaaataaatgactacgcatcttatgactccaccaagaatagtcttcctcatcaaagtgagggggcttgccaagcgaaatggataataaatgagtaactaaaccataaggaacgcgatagtaattaaaagatgtcttagagtaattttgtttgactgtctttttcttggagtcgatgtcgtcgtcctcttcggtgaagatgaagaagcataactgtcgtagtacactatcttgttgatgtgcttcttcttcccgtccttcttggtcttgctagacccagagtcgatggtctctccttctctttctcaccggtcaccttccccttgtcttttggatccatttcttcgggcggttagtcccttaatgaagagaacagctctgataccaattgagagcacctagagaggggtgaataggtggtcctgcaaaacttaactaaaaacaacaaacttggtctataaatggggttagtgaaatctaaaaccaagttcaattttgagaataggaggatttctttacttaattgctctcacaacatgtgtattgaaactagagtaataataaaagtgaagcggagagctcagaagaacaaaatcgcaatgaaagaaagtagacaacgagacacaacaatttatcctgtggtaaggctgaaggcctatctccacgttgtggcgtcccaatggatgagggtttcactcaacccctctcaagtgatctagatattaaacttgagtaccacagttgtcttacttataatatattcccatttatgagaaatctcgacaagttggagtctctcacaccttacacaatatgatcacaatcaagaacaagagtgaggggggagtaccaacacacacaagagcacaaatatagcaagaccacgcgcacgagtaaagaaaagagctcaacaatgaaaatcaacaaagtctcaactcaaaactcgctcaaatctctctagaatgaaccaaagcgtgatcggagtctcggggtttgttgtatgctcttttgattgtttcgttgtgttgcacggatactgctccatgacacctaaggggtccttttatagccccaaggagtctaggagttgtttgttcttcatacaggaagcaatcaaccttccctgtgtgcgtgcaccagactgaatggtcaacgatctgtttccttctactgccgagccaaccgttatgcaccttcggtcgcctagcacaccagacaaggcatgaggcacctaagtcatgactcgcccgaggcagcgactcacccgaggaaaattgcccgacgcagtgacgactcgctcgaggccaactacgtgcgggagacacaattccgattcgcctgaggccaacctttgcgggagacgtggttcagatttgcccgaggcagtcacgatttgccgagcgtagccatgattcgcccgaggcagtcacgactcgcctgagcttagttctgattcgcccaaggcaatcatgattcgcccgaacgcagccacgatcccccaagcgtagccacgattcgcccgagctcagttctgactcgctcgagcgcatctccgactcgtccgagcgcatctcggttgactgtccggtaaggtccaagtttggacaaacttcttcactctattttggcttgacttgagaagttccctaacacttagataacatttttaggaactaaaacaaatgaataagtgctagaaacatacctttatctttttgattcatagaggtttgcaatatgcctaatttcaagcccaaaagtgattttcttattttcctcaatcttttggacttgattgcttcaatttgctttctaaacacatgtgctcatgctcagaagaggagtgctagttcataataatgtgttgagcatttaatcaccaaaacaactggaaatgccccaagggcacatttcccttttagcctcgacctcacgaaactcgccaaggtcttccctgaaccgctatcgccgctagtgagcccctccgccccttttcttgccacgaccactgtgcattggaatcaggactgcgagttaaggggaggggaaagccagggggtttctgcgaaggccatgactctaggcaatagtatgccgaggacttgtctgagataagaaggtatgattttagctaggggcctgaacccaagatgatttttttcttttcccttttagattaaatactttacttaaatccacataaaactttgaaaatgcataaataattaaaaatgagtcaaaaaatagtgaaaccaattttttagctctctggataaattaaactaccaactaaaaatatgaaactaggtggtctctacactttttctggaatttttgaatttaagtaataatctacccatttcaaaataatagggagaaaatagatatacttttgaactaggcctgagaaattttgagaagaagccatgtaggatttgtcactgcataaaattacataaccctctgatctaggacctttgatagagtttaaccatttaaagctatttaaggccttcactaaataaaagcaagaaaaatgacaaataggtagaaccagagaactaactatttatccaagactatgtagatgatgtaaaacctagaaaaaaatataaaccatcctggttcagaaagaaaatgaatagaaacctttaatttttgcaaaacatggataactttagaaaatcatagaaaatcatccttgaagagataaacccccaattttatgaatgcttgctcttgtgctaagaggaacttaggaaaatttctaaatatgttgtttaacattttttcaaaacgcaagttagttgttagtgccttctaaccataaaactttagaaaatcatgattcatgactaaacaaccactatgtatcccttggtaaaatttgccacaagactatgctattgtacctagataccaggaaaaatacccattagggcagtagccacttccaggtaggaggtgtagtgtaatgtgcccctctgctctagttcttgttattttttctagaacagtccctaattaattttgaccccatatttccaggacaacctatgttaaccaatagtaagttactgtaatttttacagaatttttgcaaatttataaaacaaggttgtagttcaaatcacccttaaaaagcttaatagataaagaaaagagaattaaaagttaactaaacttacttaaatgatttcagtaagacctatctgaagcttaactaagtttttaggaaaataatctaagccttaatccaccttttttctttggtcaaatctcaatctggatccttaaatgcaaactgctataaatgcttatttaaatagtataaactctaacattactaagtaacttagtattgcttcaccatgcatcctctacaaactttttgcatatcatagcatataaatatcatatgaattgcattcattagattgcaacctcgcttatggagagttcgtccagattctgcagcaaggagtcgaacaaaagtccaagaacatgctcccaagctgctgcataagatctccctgcagcaccagcactttaaaggcaagccctagttttatgcataaccgttactatgctattttgctgtaattatttttgtaggcttgtattgtgcactaagtgtaggagttgtttgaaaccttgttgcatgaactcaagttcctttatgagatgaatactagtatgctaggtcgagtagctgctatgctaatcaaggatcttggtagaagtcaagttatttttctagcactcacacgaggccatgaattggttgtatccatttttgataaatgggattatgatggcttgtggacacgggtccctggtggaagccctgtctataagacataatcggaataaggattaacgtgtggatacttgtggaaagcgtttgaacgtactaaacacataccaagaaatatgataaatcggtaagcctagtaccttagtgaacctgcccgtggacttctctcctcactcgtcgcgaaatgtggtctcccatgctagcaatagtggggtgcaagggcagttactgcacggcgtcagtcagggtcagtggggcattgcatgccaaggcggtgggccctgttctgttgctaaagaatcgatgggatgactgatgtgtgtgggaatggagtgcccctgcatgtcgtgtgtccacgtttacctagcaaggttaaaactcgattcgaattgtctgcttctcgcagctaatgagactgcttgatccattatactgcattgagtaaaaagtggaaatgatgttacttgtaaaaatatgttgattgacttaatgtttgataccatgtatgaatagctaggtgctcacctagtctaaagtattattctagaacctgaaaagctaaaacttgacttcgactcggctagtgcttttagcaaaccaaacccctgagccaaacaacttcatggtctagaggtagaggagcagacccctcacaccaggtaagtctagctgagtattaatatgctcaaccttacttgtggcataattttacaggtacaactttagctgagttgggcttcagatttctcgtcaccttgcttctatgtgtagcaatacatacaaacaatcaaataatagatatggtaacactacaccaaagatgaaaataaaccacacagtaatattctatgcatcactacgagatcgtaggttcgagaaacattaaaatcggagttaaaacaaagaagttgtgggtaaaacaattttttaggcgtagatgttgcatttaaattaagaatgtattaaatcgaaatatttgagttgatattaattactttaacaattatttataaaaaacgtatgttaaaactataaattagattaactagattgcctatctaattaacattaattaaacaattaattaattaattaattaaaacatgtggcatcattgaaggaaacgtgtgacgcctgaggggtgaattaggatttctaaaactttctctaaactaggccataaataaatgcctagagcaaaatctatgtaaataaacaatctagaatgagcaaactatgttttgtctaagtgttgctatctctaccgcaatgcctaagtttcaatcctaaacaatctaagtataaagactagattgaaacttaaatgcttaatatagatgcagaagctaaagagcaaggtagagatgcaaactctcgtggatgacgtcggtatttttaccaaggtatccggaaccacacaagatcccgactaatcctcgttggtgcccctacgcaaagggaagcccacacgagggccaagcacctcggtcgagttactccgtagagagccgtgagccttctccacgcgcaagtggtgctccacttccgtctcctctcggacgctccccgccatctccactaacgagctttcgtccaaaacgccgtgggcctcgttccctccggtacacggtggcggccgtgacacaaactcgcttgtcacggtctcgcaagactcttgccccactcggtacaattacaacggctcatgcaagagtcgatgggttgtgtggtttttctaaactcacttaactaactaggattcacctagagcaagcgctaatgcggtctaactaacctaagcacttcgcaaagcacctacgctaatcaccgagtgattctattatgcacttgggtgtatgagcacttgaaaatgtctatactatgccttgttatgtttcttggactcccacaccttgaaatggtcggttgaggtggtatttataggccccaacataattctagctgttgaagaaaagctactgctctctacggcacaacacccagaatttgcttgcacgatgtccgcgcaagagaaaataaaaaaacggttgttaccggtgcttcctcctaagtcgtgattaggtggggtcttttctctttttctcttttcaattttctgtttgcattttattttctatttctggcttctaatttcatattttcaaatcagtttgtatttcaaaattcaaattttgtttggatgcaacaaccaaaagtattcagcatgaaatacaaagtgtataaataagtaaaaatgcttcaaaaca

SEQ ID NO: 232 - DNA, 2788 bp, Zea mays
  source 1..2788: mol_type = genomic DNA
gcagagacaggcgtcttcgtactcgcctatctccgcgactcaaagctttccccaattcccccccttctcccatttctcaccaccgccgccgctccccccgttcaacaacaccatgagggagtgcatctcgatccacatcggccaggctggtatccaggtcggaaacgcgtgctgggagctgtactgcctcgagcatggcattcaggtaacgaaccgtccatttccactcctgttctcgcgttgttgaggtagatctgtacggatctgtaccgtcacatacatgtagatctataatcggtatggggggatttcgtcgttcatgtgtgcctgatttggtgtggctgaatcgcggaagaaatggtatttcagatcgttagatctgtacggatctgcttgtatgtgactgtggctacccagatccccgtttgctatgtctgaaccgtagatccgttagaatggtgtggttacaattgtttttaactggaattttgatacgtagcatctgaatagagatcaccccgaaattgcacattattttccattatcaatctagtagttaggtatcgtaattgttgttggttttgcctatgtgttgtagatctgaacgccctgaagtcgtttaaatgtactgtaaatctggatctgtaaattttaataggccattttcttattcacagcttatatgtcagccttgatacagatacagtgcattgtgcgtttaatgttagtttgatgtacatcatttcgatctgttaatagatccgcaaaaaaaattgtacacattggcgttaggcacgtaatccatttagattttactgtttagatctgttagaaatgggatggaagatgccatgctgtttattaactgtttagatccattttgattttactgtttagatctgttagaaatgggatggaagatgctatactgtttagatctgcaggataaatgttgatgattatttgcatgtttacaatctatgaatagttattcgaaacatggccattggtgcacgcgctgctgccacttttagatcgtgatgatctgtctggtgtactagtggcatgtagtgtttacgcttctaatgcatttgaattatatgttcgacttttgtaagttgcataaataatgcggctatgactgttttctattcaggctgatggccagatgcccggtgacaagaccattgggggaggtgatgatgctttcaacaccttcttcagtgagactggcgctgggaagcacgtcccccgtgctgtttttgttgaccttgagcccactgtcatcgatgaggtgaggactggcacctaccgccagctcttccatcctgagcagctcatcagtggcaaggaggatgcagccaacaacttcgctcgtggtcactacaccagtaagtaatctgatcggatcttaagttggcattgatcccagatattcaatctgtaatgaaaaccatacttaaacttgatttgcttgtcttgcagttggcaaggagattgttgacctgtgccttgaccgcatcaggaagcttgcagataattgcactggtctccagggcttcctcgtcttcaacgctgttggtggaggaacgggctctgggcttggttctctcctcctggagcgcctgtctgttgactatggcaagaagtccaagctcggtttcaccgtgtacccatccccccaggtgtccacatccgtggttgagccatacaacagtgtcctgtccacccactctctcctcgagcacactgatgttgctgtcctgctcgacaatgaggccatctatgacatctgccgccgctcccttgacattgagcgcccaacctacaccaacctcaacaggcttgtctcccaggtactgtctctgtgtactgtactggctttggattcagtctgatttgtattcttggcttttgtctaaccattggctcttactgatgttgttcaggtcatctcatccctgacggcttccctgaggttcgatggtgctctgaacgttgatgtgaacgagttccagaccaacctggtgccctacccgaggatccacttcatgctttcgtcctacgctccagtcatttctgctgagaaggcctaccacgagcagctgtccgtggctgaaatcaccaacagcgccttcgagccatcctccatgatggccaagtgcgacccccgccatggcaagtacatggcatgctgcctcatgtaccgtggtgatgtggttcccaaggacgtgaacgctgctgtggccacaatcaagaccaagcgcaccatccagttcgtggactggtgcccgactggcttcaagtgcggaatcaactaccagcctcccagcgtcgtcccaggcggtgatctggccaaggtgcagcgtgccgtgtgtatgatctccaactccaccagtgttgtggaggtcttctcccgcattgaccacaagttcgacctcatgtacgccaagcgcgccttcgtgcactggtacgtcggtgagggtatggaggagggcgagttctccgaggctcgtgaggatctggcggcgcttgagaaggactacgaggaggtcggtgctgagtttgacgagggtgaggacggcgacgagggtgacgagtactagacgctctactggcgcggcgtcgtcgggcttgtgtgccactgctatcctgtgatctgccctgagtggctcctatcgtgttatgtttctgtcggttcttatctatctgtcgttgtgtggtttacaacttacgttgtaagactttattcccccgctttgctactgggttattaagtttggcgtta

SEQ ID NO: 233 - DNA, 2788 bp, Zea mays; identical to SEQ ID NO: 232
  source 1..2788: mol_type = genomic DNA

SEQ ID NO: 234 - DNA, 1760 bp, Glycine max
  source 1..1760: mol_type = genomic DNA
cgcagttcaattccaatatattccattctctctgtgtatttccctacctctcccttcaaggttagtcgatttcttctgtttttcttcttcgttctttccatgaattgtgtatgttctttgatcaatacgatgttgatttgattgtgttttgtttggtttcatcgatcttcaattttcataatcagattcagcttttattatctttacaacaacgtccttaatttgatgattctttaatcgtagatttgctctaattagagctttttcatgtcagatccctttacaacaagccttaattgttgattcattaatcgtagattagggcttttttcattgattacttcagatccgttaaacgtaaccatagatcagggctttttcatgaattacttcagatccgttaaacaacagccttattttttatacttctgtggtttttcaagaaattgttcagatccgttgacaaaaagccttattcgttgattctatatcgtttttcgagagatattgctcagatctgttagcaactgccttgtttgttgattctattgccgtggattagggttttttttcacgagattgcttcagatccgtacttaagattacgtaatggattttgattctgatttatctgtgattgttgactcgacagatgcagatcttcgtcaagaccctcaccggcaagaccatcacccttgaggtggaaagctctgacaccatcgacaacgtcaaggccaagatccaggacaaggaaggaatccccccggaccagcaacgtctcattttcgccggaaagcaacttgaggacggccgtacccttgctgactacaacattcagaaggagagtactcttcacctcgtcctccgtctccgtggtggcatgcagatcttcgttaagacactcaccggcaagaccataaccctagaggttgaaagctccgacaccatcgataacgtcaaggccaagatccaggacaaggagggtatccccccggaccagcaacgtctcatcttcgccggaaagcagctcgaggacggccgcaccctcgccgactacaacatccagaaggaatcaacccttcacctcgtcctccgtctccgtggtggcatgcagatcttcgttaagaccctcaccggcaagactattaccctagaagtcgaaagctccgacaccatcgacaacgtcaaggctaagattcaggacaaggagggaatccccccagaccagcagaggctgatcttcgccgggaagcagctcgaggacggacgcacccttgctgactacaacatccagaaggagtcaactctccacttggtgttgcgtcttcgtggtggtatgcagattttcgtgaagactcttacgggtaagactattaccctcgaggtggagagctctgacaccattgacaatgtgaaggccaagattcaggacaaggaaggcatcccaccggaccagcagaggctgatttttgctggcaagcagctcgaggatggaaggaccctcgctgactacaacatccagaaggaatcaacccttcaccttgtcctccgtctccgtggggggttttaagctcgttgtgtaatgttggatgtgttcccaaaacatttgaagaactttgatgtttaatgggtctgtaataatgtcccttgaaaataagttcggtttgtgttgaactcaattgtgtcccattaataatagtactctaatatcccacctacgtttgttatgaatgtgtgaaatatgaaatgattaattgtca

SEQ ID NO: 235 - DNA, 1052 bp, Glycine max
  source 1..1052: mol_type = genomic DNA
agttctctggaagaggagtgaagcagcagagggaggagcggcattaaaaatgcagatcttcgtgaaaaccctaacggggaagaccataaccctcgaggtcgaaagcagcgacaccattgacaatgtcaaggctaagattcaagacaaggaaggtactactcgtcatttcccaaactccatttattgaatcgcgtttcccaattttccataaaccaaaaaatcctcgtttgaattttcaggcatccctccggatcagcagcgtttgattttcgccggaaagcaacttgaagatggaaggaccttggccgattacaacatccagaaggaatcaacccttcaccttgtcctcaggcttcgtggtggcatcatcgagccttccctcatggctttggctcgcaaatacaaccaggacaagatgatttgccgcaagtatgcactctatcttttttcgttttgttttttattgtgttttatgggacaataacttagccccttttgcttctcgagtggaaaaggggttattcttgttccctatattaatgtccatctatactttgtcaactgtgattgttactcacagttgattttcattgttggtacattctagctgtgttttatgaattttattttggcttggaaatattttattgataattacttgcttttacttatgtactgaagtgtgttggttttggtctattagatgctatgctcgtctgcaccctagggctgtgaactgccgtaagaagaagtgcggtcatagtaaccaggtccgtcctcagttaatgttggattttgtctttttttcttctaccgtttagtggtttaaatatgattgactttgaaaaatgttgctctcttgcagttgaggcctaagaagaagatcaagtaaattctgggtgggatattgttggtctctactttcgttttgtttgtcttagaacagtgacttgtttggtatttatcgtttctggttttgattaatgttaattgttttgagacaatagttttgaactagtcaattatatttttatgatgccattttggtctta

SEQ ID NO: 236 - DNA, 3790 bp, Glycine max
  source 1..3790: mol_type = genomic DNA
aaacaagctcgcttcttccttctctcatcaacaacatgcagatcttcgtcaagactttgaccggcaagaccatcaccctcgaggtcgagagcagcgacaccatcgacaacgtcaaggccaagatccaggttctctctcttccttctctttaataagcgcttctaatctcatccagttagggtttaacgcgtttgcttttcaaaactcaaccggattaatggttggcgaattggttttggattttgttcagctgcttgtttttgtttatgacctcgttctttacttatgagttatgaatctaaaagaattgatagtaaatatgagacgtggtcgtggtcacagatgcatatggcttctgaatcacaacctgcaagagcctctaacaaaaaaaaataaatttcccaatcaagatgggcttcaaaccaattcaaaaccagttattttggtttttattctatgaactgggtttaaagtcagttcagagtggtttcagaaccagtttttaacctgtgatctggttttatgtgtgcaaaacccacaaaaacggtgcaagtagtctgtagctattctccaactctgaaagtataaactactacgcatacactataaaacagtatataaatgaagaaaaaaaactaaaaattcagcagatataaatacaaaaaacagtacatggtaacaatggattatattcctagaaaatatcacaagtttcattagtcactataaccaactataagaaaaaaatggggtggggtggggtgggggtatttctgcactacaaatataaatcaactagtttcctaggtggtcgttagtcgttacttataagtaactgtcagacatcaatcagccttttaaaacttattctttgacttctttctagtttctagccattcagttcataacaaaaactgtagtatactaaatacactatatagttatatacaaaccttcacattattcccctattgcatttatgtactttcgttgtttcatcagacaccttgcaaagctgcttcccttccctgttcatagttccttaattgaggttatgtactgcctactaggattatgttcatttatctcttttaaagctgtcagcactgctttatacgaggattacgtttctgtgaacatttagtcatttactattaaacaatgagtgttaccacagaaacattctaaatatctaaaacgaaggagtgtaaacagagtattttatttatgaagttggacagtttttcaattaaggtttcacagtctcaaaataaatgagttgtatttgttttaagcccgtgcaatgcatgagctgtacatttgttttaacgtaattaactcatggaaaatgaatataaatataacctatatgacatgaaatataaatatcatttttgtagcttaactattaacatttttattcaatgcttttatctttgtgtatcataaatagttagtctatgatgtatatactactagtactatgctttcattttaaaaaagttgtttacatgtatttagtaattaatcccatgatttgtataatgaaatgcttacatataaatatttattctatgatttagatattaatataattttacatggggtttttcattatatggcgaggcctgctgaattggagcttgatgtatcaatgatagcacttgccatatctgagttgcagcattaatttctaacaactggtggaatgtgtttttaggacaaggaaggtatccctcctgaccagcagaggttgatttttgctggtaagcagctggaagatggtcgcactcttgctgattataacatacaaaaggaatcaacacttcacttggtcttgaggctaaggggaggtaccatgattaaagtgaagactttaactgggaaagaaattgaaattgacattgaaccaactgatacaatcgaccggatcaaggaacgtgtagaagaaaaagagggaattccacctgtgcagcagaggttttctcttttcttttactaattggacttggcagtctttgctaattcaattccacatgatttaactcttacatggaaatgtgcatgtcacttgttaactgcaaaaagcttgtgtttttttatcatatatttgcgtatttatcttcatctattattttgttacatgaacatagacaagttacatgcatcatcttgtagggccttttttttttatcagccaaaatatattatattataaatgaatgaaagtaccagaggtactataagtacaatattagtgctaggtatgctgctggatccactagtgtgaagatccagattgcagacctgatatattactacagtgaaatacccatcatttctatcctatatacaaaaagctactggtagattactagaccagtaggtatatgagtcaacaaaatctttctcaaaccctctaagccatgaccagattagaaatattgcatcttccagcagcttgcttccattaaaaggttcatttaggaagacatttcgatttctgtgctgccaaatagactaggttagggccacccaccagcacttccatctagaatactgctttccaccagcacttgcatcatcttgtagggccttaattgatgatcacatagcacaagtactagtgaactagagttatatgcaatcttgtcagtgaaaaaatgatagaaaatataaaaaaaatattgccttgttcttttttttttttttataaataaaattcaaatatagcgtaatttttgtgtgtctatattcttacaatatgatttctggatactagtgttaagtaggtctagatttttgaacttttccatgaagtagaagcttcttcaatcagcttatacagaggtcttgttttatttgggcttttgtacattcattggaagtatgaaattttggtgtgggatttatacagccttgggcatcaacgcttcaaggcatgatgagatgttagaatccaattccaaggtatctaattcaagtctcattggaattatgggattctagtgtgggtcttgtgaggactgggactcttcaactacaatgactagcttttgtgtgtggttctcccaaggttcttgccaagaacttctctaagattgtatttggcttggcttttccttttgcaataaagagaagcccaaaaaaagttaggctacaaacataccttagtctaggttagcatataatctaaaaaggtttggaatgcttatccacattcatgcataaatttatgcccgaattagaaaactactggtacgcattatttgcttgtcattgatatattaatctcatcaaattgtattgcatactcgaattgataatggagaatcttctgaagaattcctaattagtacagttgtatttgacttgcttgatattcaagagtagcaatgaattttgattttcatttgatgtatttattctagtggaatcattagaatcttacgactgttgcatcctgctgcagactcatatatgccggtaagcagcttgctgatgacaaaacagctaaagagtacaacattgagggtggttctgtacttcacttggtgcttgcattgaggggtggtacttattagtgtagatgcatatcagaacccaaagacatgaaaggaagctctatacctgtcccgtctctgaagacatcattgttcttatgtgcttggttgtaattgaggctgctattggtggtcagtaactcagtatctttaagttgtatgctatttgaaacccgaagttggcctttataaagaatatctgaaaaccaatgatttaaaaccatagt

SEQ ID NO: 237 - DNA, 2778 bp, Glycine max
  source 1..2778: mol_type = genomic DNA
aaaagtggttgcaacgttttatcaatttcatccgttgccgaaaaagaagcatatgatataccaaacgttgtcgtgtcaacagggttcacggtcctaattcatccacgcgtcacaatgtgattggaagaggtgccgttgccgtgacgaagcaacgctacgtttttttgttataaaatcgaagtaatacgcaaccattcttcgtaccaaagctgaatagccattcgtattgtcgcagagaaagaaaaccctagctcaccgtttcaaggtatccttcgctcctcttctccttctgattaagattcgattattagggtttgtgttagtttttcaccgatcgtcgtatctgtgagtgtgaagcctttgattttgatttggggattttcgtgtctgctaattttttgttgaatctactcgtcgtacatcattgattttaccctcttgataatcatacatgctgagatatttttgaaactttttcttgtataattggctagattgtttctatttaattatgttgattgaaagcaatctcgagatctgttgtaaatatgattaatttgtcaaaccgttgggcacgtattgttgtgtattgtataatttgtaaaatcttttgttatataaattagtcagaggctgtttttctcgtcttattttgatatcgatgtgatttatttaatcattggaattgtgttatcaaggttgtctattttcttttgttttgtttgcttttttgtatgggctttgatttctatacaactatacatgtaatttttgtatgtgactgtttcctcagtatgttgattgtttgagaagactaagactttgatgaacacgttttttaatttgtgttgctgtgaatagaattgattttatgtgctagtattgcttttagtcctttgttttgtgacgtctttcctttctctatattcattcactttagttttcataatgaagaattggtgattaattttatcgtatcttgttttatagatgcaaatcttcgttaagaccctcactggtaagaccatcactctcgaagtcgagagttcagataccatagacaatgtaaaggccaaaattcaagacaaggaagggatcccaccagatcagcaacggctcatttttgctggcaagcagcttgaggatggacgtacccttgctgattataacatccaaaaggagtccactctccacttggttcttcgtctccgtggtgggatgcaaatctttgttaagaccttgacgggaaagacaatcacccttgaggtcgagagctccgacaccattgacaacgttaaggctaagattcaggacaaagagggtatccctccagatcaacagaggctgatctttgctggaaagcagcttgaggatggccgtacccttgctgattacaacatccagaaggagtccactcttcacttggtactccgtctacgtggtggaatgcaaatctttgttaagactctgaccggaaagacaatcacccttgaggtggagagctctgacaccattgacaatgttaaggctaagattcaggacaaagagggtatcccaccagatcaacagaggctcatctttgctggaaagcagcttgaggatggccgtacccttgctgattacaacatccagaaggagtccactcttcacttggttctccgccttcgtggtgggatgcaaatctttgtcaagactctcactggaaagaccatcacccttgaggtggagagctctgacactattgacaatgtcaaagccaagattcaggacaaagaaggtatcccaccagaccaacagaggctcatttttgctggcaaacagcttgaagatggccgaaccttggctgattacaacatccaaaaagaatctaccctccacttggtgctccgtctgcgcggtggtatgcaaatctttgtgaagacccttactgggaagaccattactttggaggtagagagctcagacacaattgacaatgtgaaggcaaagatccaagacaaggagggtatcccaccagaccaacagaggctcatttttgctggcaaacagcttgaagatggccgaaccttggctgattacaacatccaaaaagaatctaccctccacttggtgctccgtctgcgcggtggtatgcaaatctttgtgaagacccttactgggaagaccattactttggaggtagagagctcagacacaattgacaatgtgaaggcaaagatccaagacaaggagggtattcctccagaccagcaaaggttgatttttgctggaaagcagcttgaagatggacgtacactggcagactacaacatccaaaaggagtccacccttcaccttgtccttcgtctcaggggaggtatgcagatctttgtgaagactttgacaggcaagactattaccttggaagttgaaagctcagacacaatcgataatgtcaaagcaaaaatccaggacaaggagggtatcccaccagaccagcagaggttgatatttgctgggaagcaattggaggatggaaggactcttgctgactacaacattcagaaagagtctactcttcaccttgtgttgcgtcttcgtggtgggttttaaaagtctgagaatgttctgtaggtgtcttgaagtctaagcatgtggaagttccgaagatctttgggttttttttttttaatgttcctgaaaggtttactcttgttaaagtgtttccatggtcaatagtggcctttgaaaaactgttgtttgttctggtctttttataaattctgtttggttcgtgaa

SEQ ID NO: 238 - DNA, 2562 bp, Oryza sativa
  source 1..2562: mol_type = genomic DNA
tatgcaaaacaaccagcaccggcggccgcagcctcacgcggcgacctgaaaacctcgcagccgtaaaaccctagaggcggattccggccgcagatcggaggcgcggcggcggcggcggcggcggcggcagaggaggagtgtccggtatgcagatcttcgtgaagacgctgacggggaagaccatcactctcgaggtcgagagcagcgacaccatcgacaatgtcaaggccaagatccaggttgctcccccctctctctgtatgcctgtatgcatgcttcttggctcgatatgccgcgatgagatttgccatggctccgccgatgtgagttgtggcggtggttattattattatttttgtttggagaagtcttgggatgattctgtcctgatttagtcaggagatatatgttcttgtaaaggggaaagtatttcatggagattgtaccagctatttcaatttttaatcactgatgatgctaggtttacgataaaatcttgagaaaattccctatgtagcataaaaaaaaagttgctcttccctctatagcacccaaacttcaaaagttccctatctaggcacttctaaaatttcccatccctatgtagcacttccgttaatttttacacttatggtgttaacttagcaggagaaaagacggttttgcccttctttagttttcagacttgcgtgtgcatgatcgttggtattttaggcgtacaagggcttagttggatcaaatgattttcttagaaactctaatataataactaggttaatgaaactttacccttttcatcctatggaattattttctaagtctcatttgttcattttctaaaatataaatgagcataaagttaggtgacaaaatctcttgttacgattattttattttcaaatttacaataatcaatcccctcggtgagaaatgggacaaacttaattacatagttattcaccacatgcgaaagactttttgaacgacagtgaaaagaacgggtcactaattaaattgatacccaccggccaccacttcggtctttaggagaaaatgacaataatatattcgccacgagataaatcccagttagaaatggaaggagcaatttaatttcaccatgagccaaatcgcagtgaaaaggatagcaaaagtcactcaagctagaaacataaagaagggcaaaaccgtcttttctcctactagttaacaccgtcaagtgtaaaaactaacggaagtgctacatatggaagggaaattttagaagtgcctagatagagaatttttgaagtttggatgctatagagggaagagcaactttttttgatgctacatagggaattttctttatcttattatttctgtgctgttgtagtagattataaattgccatatgctggtgcagcgtgaagtgaaaccgtaaaattgagaggaagcaaatatatactagtattgtattgctaggcttggctggctgtaatacggatctccgtaaaatgcggatgaagggtggttggatcgatcaattttaggcaaacttcatcttttaatgttcaggctataacctgcaactgatcattgcatctcccttacctcatttgcatatctccataatcgtacatcaacttaaattacaaaggcctgaagttaactcattgggacttttgctatcacaagtcttatgggtaacttgtcgatttacttgctggcttccttcagcgaggtttaagaaatccacatgttacacaaaaaatcacataatttgaaatggaactattttccctactgcttatgtattgaggaaataatccagtggctagagttatatcattgaatacaactgagtgacttacatacgtttttttccttctttaacttcaggacaaagagggtattcccccagaccagcaaaggctgattttcgcagggaagcaactggaagatggacgtacattagctgattacaacattcagaaagagtcaacgctccatttggtcctgaggctcaggggtggaaccatgatcaaggtgaagacactcactgggaaggaaatcgagatcgacattgagcccactgataccattgatagaatcaaggagcgtgttgaggagaaagagggtattccacctgttcagcagaggtagtctttttccccttgaaaatggaatgctgctggcaatttttgtggttatgacttctttttacgcattcactgaacatgataaaatgttatgtaggctcatttatgctgggaagcaacttgctgatgataaaactgccaaggattacaacattgaaggtggctcagtgctccatctcgtgcttgctctgaggggtggtcagtagatgtagtttccatgcccgcattatctctaaagggagaagcatatttgctattctatttctatctgtagttgctgcagacttatagctatatttggtaggtttattgaagtcctatgcgattggcgcattgtgtattggaatcaattgtcatctgtactggaaaggaaatattggaactaagttaagcagtagtttatcaattgccattctatttc

SEQ ID NO: 239 - DNA, 1986 bp, Oryza sativa
  source 1..1986: mol_type = genomic DNA
aaatccagccaagaggggaaaaaaaaagggaaggaatttttttcttttttttttgttcgcctccgcttcttcctcacgcagctctcgcctcgcctcgccgcccgccactagagaggagagggagaaggaggaggaggcaaatcccagcaaaagaagatgcagatcttcgtgaagaccctgacggggaagaccatcaccctcgaggtggagagcagcgacaccatcgacaacgtcaaggccaaaatccaggtttgattcctccaagctaggctatagctgtgaatgatgcgacggcgttggatggatcgctgtcgctggtcgtgtttccctcttgggggaggggcttgatcgaccgatcgatcgatctagcccgcgcccgtgtcgcgcgatggttcttgccctagttagttatttactgtgccatcagagttgggttttgttcaggttcgaattgggggaagtggttttgagaagctgaagctgtatatttttgtccattcacagtttgtagattagttgcactaattttgagctatgcctaaaattagatcaagcacgaaaggataatatgttcggggagaaattaacattgaggatgaatacggtagtaggataatatgttcggggagaaattaacattgaggatgaatacggtagttgctcctcttgaggttgagatcgccgaattcgtgcaaatttgataatgaacgctccatttccatgtgattgcacaatgtttgtcaggttgaatagtactgtacaattcaataaataatcaataacatcgtcccttgctatgaaatttgacttgtctggaattaaagatgctttgagttgtgtgttgtattagtatatagattattagtcaatagtcaagaaataaagatagatggtaatcttgaaaagctgcctagggtagtggagaatatgtcaaatggtgtggtccaatggcatactcatattttatctcattatttatgacgttgtcctttatttctcctagacatgcgaaccttactgcctttatggaattcattctttcagtgaaggtccccatactctttgtctaatgattgatcgattccatgagatttagaagcgtatcattggtctattggtcctatcatatcgtttgttgccagtttgatcagaatatcatccataattctgcgttgtcgatgcctgtcttacaattgtaaaaaacaagtgcagtgacagtttgtagcagctacttcggtcagtggaaactaagctaacaagttattttgttcactgtcgcaggacaaggaagggatccctccagatcaacagcgtttgatattcgccggcaagcagctggaagatgggcgcacactggccgactacaacattcagaaggagtcaactcttcacttggtcctcaggctcaggggtggcactatgatcaaggttaagaccctcactggaaaagagattgaaattgacattgagcccaccgacacgatcgataggatcaaggagcgtgttgaggagaaagaaggcattcctcccgtgcagcaaaggtgtatattcttggaactgcatttcatattctgctcaaaccagtttctaaatttttcacacatcggtgcaaaggtggtctgctactatatatctaggactagtattatctgagctgacaaaagtatttggtttcttcttgtaggcttatctatgctggtaagcagcttgccgacgacaagactgcgaaggactataacatcgaaggtggctctgtcctccatcttgtccttgctctgaggggtggttattagtaaagctaatgtgctagtacttagctcaataccttcgaatggctgagaaaatttactcttgttggcatggaacttgcgaagggataataacatgctagctttgcacatttgcctagtgggagaggttgtcttccatgttattatcttatatgatttgaggcatattattccagattcaccagtcttcactgtt

SEQ ID NO: 240 - DNA, 2185 bp, Oryza sativa
  source 1..2185: mol_type = genomic DNA
aaaataccaccgataaacatccaaattcaagaaatgccatcgatgaacatatattcctaaaaatgtcattgtacaatcgtctttgttccataaatatcatcgtcattagattttcattaacagcactccgttcagtgctataaaaagatcattttaaccctacgaattgttgaaagctgattaaaacttttgttcttttccattgggttgcacaggccatccctgggccaggccaggttctgacattgcccacaagcagcccattagctgtctcggcccagatcttccaacgcctgaactgcatggacagttgggtacacaggtcagcgctccgaagaagaaaatactttccttcacgttggcgcccaaaggtcgtcatcatcatcgatccaaaccgctttattccctctcgtagccatcgtgcatgcatgccattgccatgccagccaatcccttcttcttcgcgctagatctccattatttttctcatctcaacctaacaacttcttcctcttcctcgctatcttttctcgcacgggaatccggatgagacctgtcgcctgagctgagggtgagctcggtgtgtacgttgtcggggacgatgaggatcatggtgcgcacgctgcgcggggaccgggtggcgctcgacgtggacggcgccacgacgacggtggcgcaggtcaagggcatggtcatggcccgggagcgcatcgcggtggccatgcagcggctgttcttcgccggccggtgcctcgacgacgaccaccgcacgctcgcggactacggcgtgcgtcacgactccgtcgtcttcctcagcctccgcctcgccaccgacgcctatcagtacgtgcaaatttcacaacgacgacggcgagcattcttacgattttgttttgacgaaccgatcgatcgatcgatctatggcaggacggagatgcataatgtgcggttgatgcagccggagacggcgacggcgaagcaagaaatgcatcagcagcagcagcagcagttgcatgtccatgtcgccgccgacgacgaggagaaggcgatcaagaggaagccggtgtcgcggcgcgcgctccgcaagatcctgtcgcggctgcaggtggacgcgtggacgagccagcacgacgccaagttcctcgacctgctgctgcgccacacgggcggcggcggcggcgcgaggaacgtgggcgagctcaccggcgaggactggtcatccatccgcgccgagctgaacgccgccaccgggtccggcttccccgtggaggagctccagcggcggctgggcgagttccggcgggagttcgaggcggcgagccggatcaagaaccacccccggttcagctacgaccctcgccgccgcgtggtcgtcgccaagcaggccgactggaagaactacatactggtgcgccgccattgctgcatccttccgaatcgcgaatgtcttcttctcggtgagctgttcttacctcgatcgtttgttttggcggtttcaggagaatccggaggcggcggcgtacgaggggaggagcccgcggcatctgggccggctccgagcaatcttctccggcgacggcggcggcggcggcggaggaggagccaagtgccgcgagacgaaggcgaggagttgcctgaggaagctgctgcggaattttaggctgcgattcaagctgtagatagtttaaatttctgcaatatttgtctcaatttgatcgaggcgcacgaaattgttggttagttttagagcattcaattgagatcttacagtagttggagacacgactctctgagctgaagcaacgcatcttcagtcgcttgtaaagggtgctctgctgtttttgaattggctaaatgctactaatcggactgacattagtagaagcttgtgtgtgattgaaggcccgaataaattccaaatccatatggcatcagccctagttctcctgggccatctttgcatttgcccattctggctatgcgaaaatctgcagccttgaaaaatttccaaatcctctctatcgatctattgacacgaatctctgcagccctgaaaatttcagaatccttgattttttttttcgttaaaactttacaagtttgtggaatgatttaatttatcacataggagtattaatctatcttgttaaaaaaaattactacctccgttttttaatagatgacg

SEQ ID NO: 241 - DNA, 2527 bp, Oryza sativa
  source 1..2527: mol_type = genomic DNA
ccttccgcgaaccgcggcggtgagagaggaagacgtggtggagtgagaactgagaaggcgggggagaagagcagcgccgccgccgccgccgagctctccggcgacgccaagtcgaatcggagcccgacgcggcggatgaagcgccggcccgccatggactcccacaacgagcagccgccgccgccgaagagcttaaaggttcgcgatcctccaaaccccctccctccctcccggcttcgcatcgctcgctggccttcgttaggttgtacgcgcgcgcgcgcgcgtggttggtttggttggttcttcgtcggaatgcgagtggaggagtgggttagcgaggtcggctccgatgggcgcgcgggagggcccgtccgtagtttctggctactggctagggctccgatgaggcgaggagtgaaaggcgcgggtgtgtgtacggtgaattttggatgatccgtgcgaacctggtggtgtggtttctgtgctgaagtattgatgattcttactactactatctcacatttgggttaaatttgggggtttctttagtcatttagtgccggtagtaatccaaatccgctagggtagttggaaatggaggttattggaaagcgtttgaacaaatattcgtgtagtatgaacaaatcatcttgtggtccattgccttggaccatggggatcagggcaaatgtgattcggttgttcaggaacttcagatgctacaagtgggtggcgggctggatgtttcgcggcgcagaatagttatgtgtgagttttaggactcctatattcaatatctaatgttggaggtttggttcttggtatccttaagttaatagccaatgtggtccttgtccctttgcacacttgtccactttggtcactttataatactatactagggccttgtttagttccaaactttttcttcaaacttccaacttttccatcacatcaaaactttcctacacacataaacttccaacttttccatcacatcgtttcaatttcaaccaaacttccaattttagcgtaaactaaacacaccctagtacttcctatgtgccatcagctgattagcattactgtaacattgcaatacttcctggggcacacctgggatcataattacattgattgctgggatatcaagaagtaaagtagcgaatcaaagtccctttcttggtaaatctgtatatactaatgccccctttgattcaaatccatttgattgctgcctggtatgatgttctcttccattgtaaactatgtgcaattccaacgagagaatagctgggttatatttctagcagcttaatgagtcagtaaatccaatatttgtgcagatctatgtgaagatgatgaagacgttcaccctcaatgtgaatagtactgatacagtcgatcagatcaaatccaaactcagtgctattgaggggattgacaagagcaagcaagagatgttctttgctgggatgcacttgaagaatgaggataagcttgctgattataacatcatgaccaactcttctgttgacctctatgtcactgatgctattcaaatatctgtaaggattccctctgttggaaagaccaccaagctcaatatgaggaaatcgaatagtattgctgacatcaaggcggagattgaacaggaggaaggaattcttatgaacgaacaaatcctgatgtatgccggtcaacagcttgaggacaaccagttgttaagtcagtgcgatttgaggaatgatcagacatttcatgttttggtttgcccaaatgacaagcttcatgtctttatcaatgttagaggagagaaaactataggccttgaaactaaacgctggtacaccgttgctgatgtcaagttgatgattgagaatttggagggcttgcctgcatgcagccagatactcacacggatgcaatctggtgttggtgtggcgctcacagatggtcggatgctacaggatcagcatgtcaaaaacaatgatactctcttgctgcagcagaatgttcagttcttcgtcaagtcatgggagggtaagaccttaactatggttttgaaaacgtccgacacgggtaagcaaatcaaggatagaattgcagagaagttgcggatcaaagaaagtctgtactatctctgtcacaagggacgtgttctgttaactgaggatactcttctggatcatgaggtcgagagtaactccacagtttacatccgccttcggaattcagcggtggtgaaaccaaatgcaaagaagcgctaggtagctacttctatgaactatcaacttccttaaggcaagagacaaaacatagttgcttagacgttagaccctcgtatggttagtttttggtgttactaatcctagttctctagcagtgaactggaggtttcaggttcctgacttgtgatgcctatctattagtaatacttttgctgtaaaaacttttgcttgaactgaaggggagacacagaaagaactgtgcatatttccatcttgatctactgttttgtgaaaca

SEQ ID NO: 242 - DNA, 1989 bp, Oryza sativa
  source 1..1989: mol_type = genomic DNA
cgcagatgcattccatatccacattaccgcctccatttttgcaccggccgccactaatctgcgggagagagcgttcgttcgttcgccggcgagagggagagtggcaagatgcagatcttcgtgaagacgctcaccgggaagacgatcacgctggaggtggagagcagcgacaccatcgacaacgtcaaggccaagatccaggacaaggaaggtatgcgcattggtcgccatttctccatccgttcaactgttgttcttcttgttgttgccatgttattgctgattgctccgttgatccgtacgttcacacaccgtgcaggtgcatatatcgcgtttaggcaacatatagtgctagaaatcatgtcctttgccctggtagcgtgtaaactgtaaggttttctcattttgtttcgtgcagtgcccaagtatatatatcgcacgtgagtagtaagtgatagatcgatctgttcatgtagcggtgtgtttgttactgagaaaattaagcaatattatatagcattctggttagtcgtcttcgttgcgtgttccctgttgccttatttagggcaggtttagttcccaaacaaaatttttcacgctgctacatcgaatgtttggacacatgcatgcagtattacatgtaaaaaaatcaattacacagttcgccaggaaattgcaagatgaatcttttaagtctaactgcgccatgatttgacaatgtggtgctacagtaaacatttactaatgacagattaattaggcttaataaattcgtctcgcagtttcctggcggaatctgtaatttgatttattattatactacgtttaatactttaaatgtgtgtctgtatatccgatgtgatatgcaggggcaaaaaaattttttttgccaactaatcaggcccttagtcgctactatttatttgaaacggtgcagatcagcagatcggtcttgtaacggaagaaaccaatgcttttctgcacatctaaactgtatctggagagttttttgtacttttgacagttctagtttctaggattataattgtattacgcttcgatttcatgatcgcattttgtctaaatttaaaattctcataacaccaaatctgcctgttaggtatcccgccggaccagcagcgtctcatcttcgcggggaagcagctcgaggatggccgcaccctggccgactacaacattcagaaggagtcgacgcttcacctggtgctccgcctccgcggtggcagcaggggcggctaccccaaggggatcgagcccaacctccgcgagctcgcgcagaagtacaacgagaacaagctggtttgccgcaggtacatttgcttcgcgtcgcgcgcactcgaccgatcgattcatgtgcatttacgcttgaatcgaatgctttcataagattgatccttgtgtgctgaatccgacgcactgtcttctcctgcaggtgctatgcacgccttcccctcaggtccaccaactgccgcaagaagaagtgtggccacagcaatgaggtaaaccttcatttgctaggttgccacttgccattgttcatgttctttgttttgatctgctgttgatgactttatcttatcaagtcatatatcggcacttctcactgtgtgttggaatagttgtgattggcttgatcagtacgctcttgcgatgctatgctttactgtgctccagttgtgttgcacacatctgatgtttcttttcttcgtctgatttttcagataagggcaaagaagaggtttatgtccaagctttcgaagtgaaccactggaaagctccgtcgtggatcagttcaatcgaccgccttgcagcttttataccttcttattagttactttgtctcttcatggagagatgcttatgagattttgctttcaagtttctgttactggattttggacaaatctctatgaataaagttttggtataaaattttatttactgcccagctaaattcttttgggctta

SEQ ID NO: 243 - DNA, 2654 bp, Oryza sativa
  source 1..2654: mol_type = genomic DNA
atgctgcctcgcaccgccttgcccacgctttatatagagaggttttctctccattaatcgcatagcgagtcgaatcgaccgaaggggagggggagcgaagctttgcgttctctaatcgcctcgtcaaggtaactaatcaatcacctcgtcctaatcctcgaatctctcgtggtgcccgtctaatctcgcgattttgatgctcgtggtggaaagcgtaggaggatcccgtgcgagttagtctcaatctctcagggtttcgtgcgattttagggtgatccacctcttaatcgagttacggtttcgtgcgattttagggtaatcctcttaatctctcattgatttagggtttcgtgagaatcgaggtagggatctgtgttatttatatcgatctaatagatggattggttttgagattgttctgtcagatggggattgtttcgatatattaccctaatgatgtgtcagatggggattgtttcgatatattaccctaatgatgtgtcagatggggattgtttcgatatattaccctaatgatggataataagagtagttcacagttatgttttgatcctgccacatagtttgagttttgtgatcagatttagttttacttatttgtgcttagttcggatgggattgttctgatattgttccaatagatgaatagctcgttaggttaaaatctttaggttgagttaggcgacacatagtttatttcctctggatttggattggaattgtgttcttagtttttttcccctggatttggattggaattgtgtggagctgggttagagaattacatctgtatcgtgtacacctacttgaactgtagagcttgggttctaaggtcaatttaatctgtattgtatctggctctttgcctagttgaactgtagtgctgatgttgtactgtgtttttttacccgttttatttgctttactcgtgcaaatcaaatctgtcagatgctagaactaggtggctttattctgtgttcttacatagatctgttgtcctgtagttacttatgtcagttttgttattatctgaagatatttttggttgttgcttgttgatgtggtgtgagctgtgagcagcgctcttatgattaatgatgctgtccaattgtagtgtagtatgatgtgattgatatgttcatctattttgagctgacagtaccgatatcgtaggatctggtgccaacttattctccagctgcttttttttacctatgttaattccaatcctttcttgcctcttccagatgcagatattcgttaagaccctcactggcaagaccatcaccttggaggttgagttctccgatacgattgacaatgtgaaggctaagattcaggacaaggagggcatccctccggaccagcaacgccttatcttcgctggcaagcagcttgaggatgggcgtactctcgcggattataacatccagaaggagtccaccttgcaccttgtcctccgccttcgtggaggcatgcaaatattcgtgaagaccctcaccggcaagaccattaccctggaggtcgagtcctccgacacgatcgataatgtgaaggccaagatccaggacaaggagggaatcccaccagaccagcagcgtctcatctttgctgggaagcagctcgaggatggccgcacccttgcagactacaacatccaaaaggaatccaccctgcaccttgtcctgcgcctccggggcggtatgcagatctttgtgaagacccttactggcaagacgatcaccttggaggttgagtcctctgacacgatcgacaatgtgaaggccaagatccaggacaaggagggtattccaccagaccagcagcggctcatcttcgctggcaagcagcttgaggacggccgcacccttgctgactataacatccagaaggagtccaccttgcacttggtcctccgccttcgtggaggtatgcagatcttcgtgaagaccctcaccggcaagaccatcaccctggaggttgagtcgtctgacacgatcgacaatgtgaaggccaagatccaggacaaggagggtattccaccagaccagcagcgcctcatcttcgctggcaagcagcttgaggatggtcgcacccttgcagattacaacatccagaaggagtccaccctgcaccttgtcctgcgccttcgtggaggtatgcagatcttcgtgaagaccctcactggcaagaccatcactctggaggttgagtcctctgacaccatcgacaacgtgaaggccaagatccaggataaggagggcatccctccagaccagcagcgcctcatcttcgccggcaagcagctcgaggatggccgcacccttgccgactataacatccagaaggagtccaccctgcaccttgtcctgcgcctccgtggtggtctctgagcgtgtgctgtggtgcagcattggacttcattatacctatgccgctcgtctgtcatatcatcgtgtcatggttgtgttgtgttctggtttagagtccctaagttgtgttgatactattatccatactagtacaatttgcttcactgtgcatcggtaccaatcgatgatattatcattctacttctgttaatgtttctgagatgtttgatccgagatgagattctgtttgtgcattgctca

SEQ ID NO: 244 - DNA, 5960 bp, Sorghum bicolor
  source 1..5960: mol_type = genomic DNA
cgtacgcgtcccgtttttccaaaaccctaatcatcgtcacgttagcatcgaatcggcaagaataagaacaagagatgcagatcttcgtgaagacgctgacggggaagacggtgacgctggaggtggagagcagcgacaccgtcgccaatgtcaaggccaagatccaggacaaggaaggtacgacgacgcaatgcaatttgctgactagtctcaggcccttttctttatgcatgtacactagctagtcagggtttaagcaaagcaatgaaatttggttcaggcatcccgccggaccagcagcggctcatcttcgccggcaagcagctggaggacgagcgcaccctggccgactacaacatccagaaggagtcgacgctgcaccttgtgctccgcctccgcggcggcggcggcaagggcggcagctaccccaagatcgacctcaacctgctccagctcgcgctcaagtaccgccagcacaagatgatctgccgcaagtgctacgctcgcaactccgtcagggccgaaaactgccgcaagaagaagtgcggccacaccagcgactctgatgatttacctgtgttaaaagcgttaagttgaaccagttgtcatacaagctagtgtcgtttttctttgccaagaataataagttgtcacttggtcatggcattccaactcttgtgtttcgtttaggctcctttgtcagttaattgttgcctcctagaggccaaaagcaaaaaatctaagacaacaaagaaattctgccaacatgttaaaagtttctttgccaaagttgtttttttatttttttattgtactttttttggtgacgcagacacactcatctatataaatgcatatgtgatattctatccctacaagaaagcatctttaaaagtctgagctggcatatcttgaaattggcataattatcacaggtgcctcgatatggactgacgtgtcatctagaaagagcaatgttgttaaattctgaaatataatctaagaaaatatgaggcttattttatattttattaaagcctgaagattgtcatgtttgatttttgttggcttctatattgttgatggacattataaatattacacattgcgttgttcatccagaagatatcaataatgtcaacttctccagcttttcaaaagtaggcttttaccagcaaccacaaaattttcaaccaaatagccttaccggtttgtataggaatatccttgtgacctggtaagaggacaaacgaatctaagatactgaaaaaaataagagaagcagtttcactaaaaagggagagataggcatgcatcagctagcacattaatttgtgagcggacggagatagggcaagtacaatgcatagatgcttaaagtgaggtatgctggcctgtgttcccgctccttctaatcttctcgttccattctaaattataagacattttaaatttttttaaactacataaattttattatatacttagatagccatatttagatatatagcaaaagcaacatatcttaaaaagctaaactgtctcataatttagaatgaagtgatagaaaaaataaactaaaaaaatatgttgttcggctgataattttaacttacttggtagcgtgcccgtacattgctatgggtcaactaaacttttatactaaaaacatatggatcgcacgattagataacaatattgttaaattaaataccgacattaaagtgatgttcaatcagaaaagaagtttgcaaaattaacgtagtcacggagagcgtgacgtcgcaagctcacaaacttgacgaaggcagtggagacgccatatgtcgaagacgagaagtgatcagtgtggggcattgtttcctactgcgatgacatggcctttttgatcaagaactattcgtgttggtccgtggggagtctcatttagaggaaagggtgagggaggtaggatcgtaggggttggcaaacccatgacctaaggtttttgttgcacgatgtgattgttcacccaaccagtaaactaaggtgcaaatgtctgtggtatgtgaacttccataactatcattttgtttgagcgtacttgcatacttgagtgttgacgtgaatagaagattgtgtgaatgtagatcatgctattttgtagtgttgccacatgaaattctattgtttttcttatataaccctttcgcatgacattttgcattcatggtaagtttgtagcagatattgatgagatctaaatgtttaaaaaccgtttccatttatttcctgttacaactttacctaatatatatcacaacataaaccatcttgctaaagctttcttcttaggaaaactatctgatgatctctctttcttagagacttttggataactgaataatgtgaaaactttcaatatgtctgctcggtctttgctaaaggaacctgggcagccgatcccaaccccagatacccaacattacatataaggttttctgctttttatgaattttgagtttaacatgatagcaacaataatatgggatcacacgactgtgcatgaggcttgtccgagattgaggttgtctaaggcactaacgatatcggatcacacgacctgcacatggcttgtcgaaggatggcatcacgtagggtcgatgtcgtgttgatgatcaactctccaacgcttttgctctatggtaagtgctgacgaggtgtccttttgtttttttcatgtctgctaccttagatgttcttgatttctcaccgttgatgccaacaaaatctcgtattaacgctacggtaaaaacaaaagagcaacatgttaattaaaataaaacccatactcaaagtcaaagagataaattatggatgcttgaattttgtcatccattgtctaccagcatgcctataaaatagtctaaataaataattaaacatagatagaaaaatgaaaggatcattgcaagtcatcaatcatgcaaagctactaaaaaaatgagaaattatttgacaacatagttactccctcgatgatgaaaacattcagaggatcacttccacatcaagggattagagaaaaaatattcacataagaccaaccactcaactgagaaattatatgataagaaattgagaaattatgtgataagatagagttcaggtggatgcatacctagtgaataaaagaaatcgcttgtgaagtggccttctttttttttcttatacatgtggccccattttgaatttgcaacgaactaccacatactgtgtatggtaatttagccacttccatcaggtttatattcaagggatttgaaaggctctcgcttgtattgtatttttcataggaaataaatgtcagctttgtaatgcatgtcctattgatatgggccgggaacccatttgccaacgagcaaccggaccgtgccctgtccgaacgcaagaggccagtccactgctttgcgccggccacgcccctagctataaagccgcaccacgtccgcggcgccacacaggcaactccgccatccccacccaatcgcccgccctatttnnnnnnnnnnnnnnnnnnnnnnnnnnnnnnnnnnnnnnnnnnnnnnnnnnnnnnnnnnnnnnnnnnnnnnnnnnnnnnnnnnnnnnnnnnnnnnnnnnnnnnnnnnnnnnnnnnnnnnnnnnnnnnnnnnnnnnnnnnnnnnnnnnnnnnnnnnnnnnnnnnnnnnnnnnnnnnnnnnnnnnnnnnnnnnnnnnnnnnnnnnnnnnnnnnnnnnnnnnnnnnnnnnnnnnnnnnnnnnnnnnnnnnnnnnnnnnnnnnnnnnnnnnnnnnnnnnnnnnnnnnnnnnnnnnnnnnnnnnnnnnnnnnnnnnnnnnnnnnnnnnnnnnnnnnnnnnnnnncggacgcgtgtggctaccggctagatagctctccgttcgtcgcctccttctccatcgtcggttgctgcttgccggctgttcagtccccagccctcgcccatgtttcttgctgcgcgcgttgctcccctgctccggccgtagggtggcgcgagcttcgttcctaaaggcgcttccttttaccttcggttttgcttagccgcccgccatatgagcgttgttgacttgttgtggtttgatcagtgggagcattgtattctgagtgctagattcttgtagtgttggacggccctgctctgaaacagagcagatcggcctgggtgatgcgtaaaaaaggcaccttttttggatcctgggagaagaggagagggttttgatgagtaggctttcttcttgcgtctcttgtgatcgagctcaatcatggttgaatctggcaagcggccagtgtcggatttggctcctctttgttcttcagcattaaacccgattcgaaaaggcccccatttctgatttcgttcctcatctaattcctactttttttttatgtttttgtctaactctgttgcgttttcttgtgctctgcaggcatcgcgccggacaagcagcggctcatcttcgccgggaagcagctggaggacgagcgcaccctggcggactacaacatccgcaaggagtgcacgctgcacctggtgctccgcctcaacggcggcggcaagggtggctgctaccccccgaaggtcgaccccaacctcctccagctcgcgctcaaatactgccagtacaagatgatctgccgcgagtacgacgaatcccctagctagccatctcaaatcttcagctgttagttcgattgttctccatcagagtcactcaccgtggtggatgcctgcaggtgctacgcgcgcaattccatcagggccaacaactgccgcaagaagaagtgcggtcactgcaacgaggtgaaaatgctttcatctttttccccatgtcatctgaatgtgtttgtatgtaaatagtatcatttttcatgttcatggattcgattatcttatatatccatgaaagcagtgtcaccctttcatgttcagtgttgctcttaatgccatcgttactagagctactaattacgggcttactgctacatactgttttagttccatgttagtatcacttatgactgctgagattataagtcaatatgccttattttcaatgtcgattgctgctcccctgaatcatgaaccctccctccaaggacaagctctgaaacaaatacgttctttctgaacttcagtcagccgttaacattgcagaaattaaaagtagatgtttttctcactcttagatcccgtataatatatttcgaagaacacgccttttcagttgagatcaaagaaaaagcttgccttcttttacctatgtatgactgtagcaaattgtcgttcaggatcttaatcctgcttttatattaatttccatgttcttggcttttgtcatcgatcacattgctcatgatctgttggtcttcgtcaggagttctcataagtcggtttcactgtgttatatctaggtttactttgcatcagttcagatattgatgtagcttagcggttcagatttgcactcagcatagtaactgatacttccattctagagctgtttttgcatcaaccttccataaatgtactaaatgaatcccaattgctggccgctcaagcatgtgtcctgaatttctcttcattttcaccagtgatctcatttccaacgttttccctttttttcagatgagggcaaagaagaagctggctttcaaacaggcctgaaaacactgtgggaaagcgatcaatccaagtgtagttcatcagttgaatcaacagtctttattaactccttattaccagtcttagcgtactttataatctatataaatcttgtttaagttcacgctggaatacttatctgaagcagcagagcagtaccattcctaagaaactactagtcaaaaatccctgcctgttgttgaaccttcattgttaattttcgatgcaagtgaacatgggagcattaatgttatttggggtcta

SEQ ID NO: 245 - DNA, 1981 bp, Sorghum bicolor
  source 1..1981: mol_type = genomic DNA
acccgagtagaaacccaacaaaagaagaaagaaagaatttcttgggcgttcttcggtttcgttctcacgcagttctgttcgagttcggcgccgcgccgtcaagtcccctgaccggccttgcgcgagggaggaagaggcgaggagaagatgcagatcttcgtgaagaccctgacggggaagaccatcaccctcgaggtggagagcagcgacaccatcgacaacgtcaaggccaaaatccaggtgcgtgctccccatccttgttcttgttgctaccggcgagttgttttgacctatctatatgcgacgagtcgatggtccgatcgatccaagtttaccctagctgttgtgatgttcatccgatgttacttggattgatccggtcagattaatgtggaagtttagttttgggaatatattattgatgaggtagtttggattgctaggctgagcagatatagcatatccggaaggttgtgtttttgactgcttaagtaaacgtattcagtactatgtgtaattttgttgttttaaatacaattgcgcctacaactgaagcacactagagttccaacaattatgctagtttccgagttgcaacaattatgctagtctcctttaaaagtaggttcattcaatagaaattgatgcagcttgatataatataaaaaaaaatctgttccttgtactcacagcaatacttattaaatccattatgatgcaaagaagaatatattctcttgtttttattgctatatatttatggactttttaagttaatcttctaaaagatgcttccactaatttcatgcatatatgtgcatgatgctagatatagtggacatcttgagatgcagcctattatagggttcaatgttaaaaaaacaattaagggcaagtgtatgtgtcttgttaggcatcctttattttattcccctagaaattctcactctgccgttttgctctcctcaagttatgtatatgtgtcttgttaggcatcctttattttattcccctggaaattctctctgcggttttgctctcttcaagttatctctgttttttttcggtagtctatgtatagtgcattcttataatttcctatttgaaaagtttatatgcaaccttgcactatgacaaattggtcattggtttgtaaacttttcctaccacgaccttaatcatgctttggagatgtcaccgttatgttctgtgagttagtggtcactacatcttcaatttgatactaaagagttgacatgttattttgttcactgtcacaggacaaggaagggattcccccagatcaacagcgactgatattcgctggcaagcagctggaggatggccgcacactggctgactacaacatccaaaaggagtcaactcttcatttggtcctcaggcttcggggtggaaccatgatcaaggtcaaaactctcactgggaaagagatcgagatcgacatagaacccactgacacgattgataggatcaaggagcgtgttgaagagaaagaaggcattcctcccgtgcagcaaaggtaccctgcagattttagttatatctgcaactgctaatatttgttcttcaaaatgcttattctacttgaaaccaattatgctttcctgacgtctgatgctgatgaagtgatttctgtcgcctttgcaggctcatctatgctggtaagcagcttgccgatgacaagaccgcaaaggactacaacatcgagggtggttctgtcctccatcttgtccttgctctgaggggtggttactagtctaaacctgatgagccagacagataaactgttatgttggctgcgaattgtgcagacctggtgatgtggaacttgcaaagagataataacatatatcagctttgcgcctgtgcccagtggaaggggatgtcttccatgttattatctgatatctgattcaacggaattgttccagatttacctgtcttggcttttacacatttt

SEQ ID NO: 246 - DNA, 2059 bp, Sorghum bicolor
  source 1..2059: mol_type = genomic DNA
tcggatcacacctcaccagttcatctcccaccccgtcgcaaagtaaaccgccggccgggtaggccggccggagagcagagcgatcaagggaaggaattgaagcaagcgcgcggccgccggcgaagatgcagatcttcgtgaagacgctgacggggaagaccatcacgctggaggtcgagagcagcgacaccgtcgagaacgtcaaggccaagatccaggacaaggaaggtgatacatctttatatgcattgcatgcctcctcgatccgtctcttgtttcaacctttttcttctttatacatttacattagggttataatttagatagatagactaactaccctaccaattaccctaccaatttgtccggacattgttgactgccttgctgcttgttaatctgcgtgcaggcatcccgccggaccagcagcggctcatcttcgccgggaagcagctggacgacggccgcacccttgccgactacaacatccagaaggagtccacgctgcacctggtcctccgcctccgcggcggcggccgtggcggctaccccaccatgcgtgtgccgtgggacctcatcaaccttgcccgcaagcacaatgagaccaagatgatctgccgcaagtacgtgtaacccctgctgatatccttattatatcgtctgctcatctgtttaaacgtctgacccttatcgtctaatgctcatctgtttaacctgctaattagctctgacacgcattcacgcaatgtgaagataataatgccgctcaatgcatgagacgaactgatggttggctatgtgctagattattttgtttcatacatatattccaatcggacacagattgaaaatgtgaaatatatttttagcttgattacttgatcgatatacattttcataattttagattttcattcgattgtgtacgtctctacaactcattattctaggtttattgttaaatgattcggcctagctacaatgaaacatttagtttgtggaattgtcgtctttagcagcagctaaatgcaaattttagctattcatctatctgcaaagtttagctaagaagtagaatcgatgcttaagttttcatttttctgtgtctttgatgattttcaggtgctatgcacgccttcaccccaaggccgcaaactgccgcaagaagaagtgtggccacagcaacgcggtgagacttcttttttaattaatttctgccacaggcgtcatcatcaaattatcattgaaataacaggaacactcatagtattttgttgattcattagcgtcttctataagttcttacccaaattaaaaaggggttttctcatcggtcatttccacggcactcgagtttcctgctagttcgtattgtggtcctttcggttatactatctctcccccaaagtaaatcaacttatagaatcaccttaaatcaaattaatatcttatgctgaccaatatggaaaagcgtaacatcatttatgccaccaaataaatgatattataaaaatataatctatgtatatctagaagttgatttattttaggatatatagtaatacttcagcatcaataaaatttcctagtcgaagttttcatttcatactatgctaatactgtaatacatactatctgttgtgctaaatcataattcgattttacaacagttgtgtataggcaactgttttaagtaactagcagccgacaacatttaattatgatgaatcagtcctttgatctgatctgatagtttccgaacattgctcttcttttcagctgagggcaaagaagaagctcatgtgagccattgggaaaactagcaagttcaaaagtgccatccgtgagctgaataaatgtcgacacctgctatcagggtttttagtttgcccttgtttatttccaactcgatgctgaaccttgatttgccatttgaaaatttcatgccattcggtttgttgtctgaattctcgtatacttgcgtttgttcattattttagctacctacttgtaggatcaaaacaaatgtgcctctgttgcctcaaaattttctccgata

SEQ ID NO: 247 - DNA, 2475 bp, Sorghum bicolor
  source 1..2475: mol_type = genomic DNA
atcaccagttcaccgctccactccacaaccgccgccaccccccacaacacaaaaccccaccccggccgcaggggagggagagcgggaggaagcgagaccgagcaacccaccggcggagatgcagatcttcgtgaagacgctgacggggaagaccgtcacgctggaggtcgagagcagcgacactatcgccaacgtcaaggccaagatccaggacaaggaaggtaaacttagcagcagccgccgccctgctcctctcctatccgcggttccaaagtcgaaagcttgctcctttcggcgtccgctgctccaaagttgaaagcttgctcctttctgtggtttcgatgtgttcttgtagccatttacttgatcatcgatgtgcatgtcagcatgtggttgggttgatcgcggcctccactctccctatttctctgcaacctcccccgtttaatgcttgaaagtttggtcttttttcatgtgtttattattattgttacttgctgtccttgcacgcgttggaactttacatgttctgggtttattgattgtggttgatcgcgtcgtccatatcgccgtgttcgatcctgatggttttgggttagaacagagcactttgatgcttcaatatggttattagatagattaaacccaaaaaaacaaaactttcttcttgatccggtcaagcacagggcttggttgcgcttttgcgttcttactttactgatctttgtgcttcttggggttaatagtcgggggtggcttgatcggattcttggcaactccacagcttatttgaactgatcagatccctgtttcccaactcggattttaatctttgtagcgaactaaccggccatggaaactgttgtttaaccaatttatttgcaggcatcccgccggaccagcagcggctcatcttcgccgggaagcagctggatgacgaccgcaccctggccgactacaacatccagaaggagtccacgctgcacctggtgctccgcctccgcggcggcggcaggggcggctaccccatcatgagcgtcccgtgggacctcatcaaccttgcccgcaagcacaatgagaccaagatgatctgccgccagtacgtatcgaggccttaattctgctaactctactgatctcttctgtaaatgttataatttggtacagtatgtgtggtggctgcgttgtcttgttagatcgaggtaactgaacgtctgaacccaagagttcgctctctgttttcatgtactccggcctctgtgttcactgcatgcaaatggagtacatgtaatgagattgatgcaatgatacgtatgatatgataagcgcaaaatggagctgagtacatgccctttgattctggcttgtttatttcagttagatagttgatctcattatgcaaccgtgccttgtttgtatagttattgtcaaatctagtgatgaatcttaagatatgcacagctgcctctagttaaacacagcaaatttatctattcactgtcttattataacttatacatgcttcttcagtttaataagttttgtgctgtttactcctgtgttattatggctatgttttcattagcacttgaggatttgtgcctcttcagcttctttctttattagctttaaactgtgcctgtaatgtcttcgcaggtgctatgcgcgccttccccccaggtccaaaaactgccgcaagaagaagtgtggccgcagcaacgaggtaattaagccttgttttcccctgccatccaagtgttttacaagtaggccaacattattaatgttcttagatttactcttctaccttaatataatgatgcacaaatctcttgcttactcgagaaaaaaaatgttcttggttttgttgcatcgcccatgttatgatgctggattgctggtgtaagagtggatataaaatggcatcaccttgttcaagttatatcagtagcattttaccagttcagatgttaatggattttactatccaagctcatctattttcatgtaatgcttattctagttttttaattagtgtacataaatctactcttttgaaccatgacctgtttgatattttttgttcattctttgattcccccctaatattacttttcagctgaggtcaaagaagaagttcatctccaagtttaacatctgagctttggaaagcgacattctggagtgccatgcgaaagtgtcatgtatcagttgaatcaccttgtctaaacatttctatcacgggtgctagttgtcctagtttaagtttctatctgcgtgctgaaccttaaatactctttcaaatatcccatgctgtttccacgcgtgcagtggtatgcctaagaaatgctagtgaaagttcttttggcttggatgttgaaatctttgtcactctttctgaatgcactaagttgttcagtttggaagaagtggaggatgagaactagttggataatggcattttatcattatcaa

SEQ ID NO: 248 - DNA, 1314 bp, Sorghum bicolor
  source 1..1314: mol_type = genomic DNA
agctgggggattgcataacctcgtaccaccacgtacgaaaccgataggagcggagggtgagacgacgcgatcgacgtgggcagcaaattaaagatgcagatcttcgtgaagacgctgacggggaagacgatcacgctggaggtggagagcagcgacaccatcgacaacgtgaaggcgaagatccaggacaaggaaggcatcccgccggaccagcagcggctcatcttcgccgggaagcagctggacgacggccgcaccctggccgactacaacatccagaaggagtcgacgctgcacctggtgctgcgcctccgcggcggcagcaggggcggctaccccacgaccatctcgcccagcctccgcgagctcgcgcagaagtacaacgagaacaagatggtctgccgcaagtacgtatatatatatatctacgccagccgatcgagctagctatttcctttattagtttttcgttcgatgcaagaactgatgatccaagctctgcgcatacgatccctaactttgatccgtccgtcttgtcctgcaggtgctatgcacggcttccgcccagggcaaccaactgccgcaagaagaagtgtggccacaccaacgcggtgagaatcagatcatctgttttacttgttcatacacatccaataattttatttgttatataccactccgatcgttatagactatcatctttcatgctcattgttggttgatgttaatgttgtccatgttttgttcagtctcatatacaatattttgtttcaaaataattactgtcaaggttgttgcatttgcatcgctgctgcgagaaatcatgctttcagatttactcgtgggaataattggtcacatttccgggtcattcaagtgtacttttgctctttcgtccgtataattaggcaacattgttgttgcatgtgtttaggtgatcgcattttttatttggcttttccagtcatcgtatattatgtatagaaagataaacttttaattgagatccgcacgctagatctgcagttatatacttcaattgctgtcagcacgtttggtcattctttgatctaatttgtgccctcctgattttttcagctgaggtcaaagaagaggttcatgtctaagattggtggaacaaataaatgagcgttggagagccttgtcatgcatcagttaggaattttgggatgctattttactttcctttgctttttatgaataaagttgtggtaggagaaagtgtgctactcttggttaataagatgtttttatataaattattattactattattgttatattcattggtta

SEQ ID NO: 249 - DNA, 2254 bp, Sorghum bicolor
  source 1..2254: mol_type = genomic DNA
gcacgcggcggacctcgacacgaatacgagcacccccgggtgcatatatgcaaaacagccacgactccctttgcctcctcaatcatcatcatcatcatccatcggcttgattcctcaatcaacaccgcaagagccctcgttcggatcggggcttgctgcgacttggcgaggtaaaaccctagctccagatcgcgggtcgtagccggcgagatgcagatcttcgtcaagacgctcacggggaagaccatcacgctcgaggtcgagagcagcgacaccatcgacaatgtcaaggccaagatccaggtccgccttctcgtctccccccactccctccacccccatgactcccgattcgtagcggaattgtgtccttcgtgattggtagtatcaccggagtagcggtgttgactgctctatgtgccgatttggtagggtttttagtgcggttcttgcccgctggggggaaaggatcttggtttttttttttaaaaaaaaaaaatctgggatagtggactgctggcttcagtatggagattctctctagaacgggctcttatgatggtttccgctactaaaaaaataaaaaaaaacatctgggatagtggactgctggctgcagtatggagattctctccataacgggcgcttatgatggtttccgctactaattaccgtggttttggtgtcgtgtcttactatcttcgcctgtcgcctaagtcttttttgctgtgatgaatgaacaagtaaatctaggaaatttagtgcctaccatcaattgtgacagcccctctgttatgtggttagggaagatgcaaatttcccgcaagcacctgtcctaggaattcttttcataacaagggatgtaaagagttgacatcattactaatacagattatcactatatggctttgacatgttggcaatggcctcatcctctagttataatgccaaataattgcatcatggttggtacctgaatataggcgaaagcgtctattatcgtaataaatacttcatttgatatatggtttttttttgctggcaatgacaatgtcaaatatgactttatgatcttaccagtaaccccagtgctggatggcaggtttattttcccaagttacactttgcatgattagatttcaagtagaaaaggttacttatggtgcttatgcattttaatggtgttactcagattctcagtcacattttaggaaataaaagcttatcttgagtcatttttggtgcacaaaagaatttcctagtcaaacacctttctgagttaactatgaacaccactgtccatattcaagtaatacttgttttctaatacctgccatgttcaatatttttattccatgcctttgtccatgtttaatcatttttcctctctaccattttttttggccaagtgcacttaaagctgactcacattccaaaacttgtgatcataaattctaagtaacactgattgaaagatgggttaaggaataccattctaactcggcaggttctctgacatactgccttatatatttcaggacaaggagggcattccgcctgaccagcagaggctgatttttgctggtaagcaattggaggatgggcgaacattagctgattacaacattcaaaaggagtcgactctccatttggtcctgaggctcaggggtggaactatgatcaaggtgaagacactcactgggaaggaaatcgagattgacatcgagcccactgacacgatcgataggatcaaggagcgtgttgaggagaaagaaggcattccacctgttcagcagaggtactctacttgcccccacaataattatatgaatctgaaacctttctataagctccaaattcttttaatcttcttttagcattgtgtggtcctaataaaaactgttgcacgcacaggctcatttatgctgggaagcaacttgctgatgacaaaactgccaaggattacaacattgaaggtggttcagtgctccatcttgtgcttgctctgaggggtggccaatagattaaaaagttatagtttctgcttatgctatccgttacatacggttgtttcagaattgaagccttgtattgggtggttgattgtgccatgcaattagcagactactagagtcaggtgtcatctgtactgtttgagaaatgcttgaactaaggtcattcagttgccatctcattcttattgccctgagttcattcaattgccatctgatctgtcctttcacctaaatggcta

SEQ ID NO: 250 - DNA, 2574 bp, Sorghum bicolor
  source 1..2574: mol_type = genomic DNA
gcccgatttcaacggcccatatcactccaccagcccgcctcgcttccctaggaccaaaccctaaaccaccgcctcaaccacgtataaaaaccccgcacgcgccgccgccgccgccgccgaagcaatcacaggagccccccagccccgagaacatccaggttcaacaagatgcagatcttcgtgaagaccctgactgggaagaccatcaccctcgaggtggagagcagcgacaccatcgacaatgtcaaggccaagatccaggacaaggaaggtacgcgagcgcgttagctcatctgttgtagcgaagcaagaatattagcagcatgtaatgcaggcgctaagcgattcggtttgttccgtccgtaggaatcccgccggaccagcagcggctgatctttgccgggaagcagctggaggatggccgcaccctcgcggattataacatccaaaaggagtccacgctccacctcgtgctcaggctccgcggtggtatcattgagccctcgctgcaggcgctcgcacgcaagtacaaccaggacaagatgatctgccgcaagtaagttaccaccacctacgccctctccctgttaacatttccgtgaccccgaaatggaaactttgttctattcattcagtgcaatattgtcgttcgaaaacgtaatctcgaatcgtagcgacgatgattattcctaggaacttcacatggtatgtggaatttataactacatgagcatgcttgcacagggattcgtgtatgcaaaacttttgagatctaatgctattaagaaatgaacaatttggcaaacggaatttaacctcagcattagcaggagcttgatatgtaattatgcgattgaaccagctcagatgctatattatacttctcatttttagcttatcagcgtgcacaccttgataacatgagaccaccagagatcattagcaaatatgcaaaaactcctctagttttgtgtttgaaagaaacatgatttgcccctatgattggccagacatctcatgacctctgggcatgtggcttctagtgtatttaagcattttctcaccagccaatcattgttctatttctaacactgaacacatcattgagcagcctgattgtttcattttcccatctttttttttcttgctgtattacatttgggataaccaattactggcttgatgatgatttcttgctttaaccacactgaatccggagaccggaggaggtgtattttcctctcttcctttgttgcttgtctctctcggtgtttccttgtgaaatctcttccttttggtgaagaactaacatggaatttattcttccctgagcactgctcttcaccaaagggttgagatggaaggatttggcgagattgaagagcaccgtggaaggggcaaggaagatcacatctgatggatcttctcatgtggaaaaagattggcctttaaactgagagcccttaagtcattttgatctttgctttgctgtaacatttagtatttgtcatctccttgtatgacttcagtgtagttttacctggagtttggttctttttattcagtctcgtggggtcagtactgactttactgtttatgcttctgtcttttgtacaaatctggtccctgttcacttgcccttttgcatgcaacctaagctaagctagagctgggatgttgcattatgcaaggtgttttgctcattcgccttttgttttctatgggtacatttctattacttggacctgttagaggtgtattgcggtgcactcatggtgtttgtttttgttcttaatgtgaaactgtgttcttttcttctgaggaaagtgattggcatgactgatgaatcaattagatgcacgaagtgaccttatgagctgaaaccctgaggcctattttttctctgatttgccaatttacctgcccattgccatgtcattgtatccggaaatcattttaggtcattgcctcattggcctgatgttctaccttttatctgcagatgctatgcacgcctgcaccccagggctgtcaactgccgcaagaagaagtgtggtcacagcaaccaggttagtgttactgcattgcaagtgttgtgcctgtatgtaggctagcacacgtcttctccgtcctgccatttgtgaagtgctgaagctcaactaagttaatgaaatatctattgcttttcttctttcagctgagggccaagaagaagatcaagaactgaggtgttgccgctagtcagtttcatggacaattgaagtcctctgttgtagcaatgcatgttgtactgtgttgttgtcttgttgaaccgagtttgtttacccaacatttgggtctgttgtgatgtttcaccttgtcgattgtcgatgacgacagtactatatggcaatagctaattagctactgtgatttggtcacagtgtggtgctgcaattttgtttagtgggcagccggggccgtgtcctacccactccatttgaaattagtaactttaatttggctttgtcccgggttgtactattttttttctaactttgatcaatttaataaaagaactcatcatatacatca

SEQ ID NO: 251 - DNA, 15512 bp, Sorghum bicolor
  source 1..15512: mol_type = genomic DNA
ccctgcccttctttttcctcataaatagccaccccctcctcgcctctttccccccaactcgtcttcgtccctcgtgttgttcggcgtccacggacacagcccgatcccaatccctcttctccgagcctcgtcgatcgcccccttccctcgcttcaaggtacggcgatcgtcctcccgctttcgcttctcccctcccctcctctcgattatgggttattggggctgcgagtcatctttctggcgatttattatggtctcgatctggtggtaactgtggcgatttattatgggagccctcgatctagaagtcgagtactctctctggtaactgtagcgatttgttatgggggctctcgatctagaagccgagtactctctggtaactgtgggacccttgtagggttgggttgttatgattatttgggcttgtgattaggttgtatctgatgcagaatgatgtattgatcgtcctattagattagatggaaacaagtagggtgactctgatttatttatccttgatctcgtttgatgtccctagctaggcctgtgcgtctggttcgtcatactagttttgttgtttttggtgctggttctgatgcccgtccagatcaagtcatatgaaccagctgctgtcttattaaatttggatctgcctgttttaacatatatgttcatatagaattgatatgagctagtatgaactagctgcttgtcttattaaatttggatctgcatgtgttatatgatggatgaaatatgtgcttaagatatatgctgcggttttctgccgaggctgtagcttttgtctgattaaagtgcatcatgcttattcgttgaactctgtggctgtcttaataagaattcatgtttgcctgatgttggagaaaacatacataagaattcatgtttgcctgatgttcgagaaaatatgcatcgacctacttagctattacttgatgcgcatgctttgtcctgttttgtttgatatgcatgcttagaaagattaaaatatatgtggctgctgtttgattcgataattctttagcatctacctgatgagcatgcatgctcttgttattcactgctactgttccttgattctgtgccacctacatgttacatgtttatggttgcttctttttctacttggtgtactactatatgcttacccttttgtttggtttctctgcagatgcagatctttgtgaagaccctcaccggcaagactatcacccttgaggtggagtcttctgacaccatagacaacgtcaaggccaagatccaggacaaggagggcatccctcctgaccagcagcggcttatcttcgctggcaagcagcttgaggacggccgcacgcttgccgactacaacattcagaaggagtcaaccctccacttggtgctgcgcctcaggggaggcatgcagatctttgtcaagaccttgactggcaagacaatcacccttgaggtggagtcttctgacaccattgacaacgtcaaggccaagatccaggacaaggaaggcatccccccagaccagcagcggctcatctttgccggcaagcaactcgaggacgggcgcacgcttgccgactacaacatccagaaggagagcactctccaccttgtgctccgcctcaggggaggcatgcagatctttgtgaagaccctgaccggcaagactatcacccttgaggtggagtcctcggacaccatcgacaatgtcaaggccaagatccaggacaaggagggcatcccccctgaccagcagcggctcatcttcgccggcaagcagctggaggacgggcgcactctcgctgattacaacattcagaaggagagcaccctccacttggtgctgcgccttaggggaggcatgcagatcttcgtgaagacccttactggcaagacgatcacccttgaggtggagtcctcggacaccatcgacaatgtcaaggccaagatccaggacaaggagggcatcccaccggaccagcagcgtctgatcttcgctggcaagcagctggaggatggccgcacccttgcggattacaacatccagaaagagagcaccctccacctggtgctccgcctcaggggaggaatgcagatcttcgtgaagacattgacgggcaagaccatcaccttggaggttgagagctctgacaccatcgacaatgtgaaggccaagatccaggacaaggagggcattcccccggatcagcagcgtctgatctttgctggcaagcagctggaggatggccgtactcttgcggactacaacatccagaaggagagcaccctccacttggtgctccgcctgaggggtggtatgcagatctttgtgaagactttgactggcaagaccataaccctggaggttgagagctctgacaccatcgacaatgtgaaggctaagatccaggataaggagggtatccccccagaccagcagcgtctgatcttcgctggcaagcagctggaggatggtcgcacccttgcagactacaacatccagaaggagagcaccctccacctggtgctccgtcttcgcggtggtcagtaagccatcagtcgttgaagctgctgccgcacctgggttgtctagtgcctcttgtttcggccatgtccagtctttgaagtatctgtatggtccgtcattgaagcgttggtcagtctgaagtatttgtatggaagcatttgtatggtctgtgtcgtgtctgagttcgtttcatggaccggttgtgttcctctgtgttctaccctaaactatagtgcggcagcatatggcttaattctaaataaatgtgatgttggaatttaaaatatgtgttgaatattgttttttgctatgtcagttaattttactaaattggttggctatcaattttttttactggtgtttgtcgcacctaaatcttttgactgaatgttcacttcaggttctggcatttttcaatttttgagactggttaaaacctactacctaaaaagaatgcagttcttgattttcattagaagtttgattagagctactgatactggaccgtccatcaggttaaatgtgcatagaatcataatattaatcatatttttttttatgaaagcttggcttaatccaaacctttttcctttttggatcatattatggatcatattattgatatatacatgtttgtctgattacatgtttgatttgattatttggtccgtgactattactattttattctttggatcatattgttgatatatacatgtttgattgtctgattacatgtttgattatttggccattgcaaaataaaacttgtgtaatctcttgttataatgttattacgtgtctacctatgggccaaattagtattactggatgcggctagaagtatagacccttgattaaagaaatttcacggttaaactgatggatggatgttattggcctggaaacagctccttgctgattgatcagctcagtttgatttggtaaatatcagtgtatcacaatgtgttcagagaaatcaagctcttcattcatatccttggcttttgagttttgttataggctagtgttcgtctaacctgcagtttccggctgtttccagtttcttgttggatgttcactctgtattgactagtaaatgttagctagagtattcagattccaactgtcggattagtcctaaaaaaaaattgtcggaacaattataaatgtctcgatgcgggcacatcacaccgtttgttgtagattaacatatttggctagattcagatctttttgaatcaaggagatgaaggccatgtactcatgtagtcatgttggcttgtgcagaaccttgttcccgatttacgagttaatgtattcctgtgtatgttatcactcttgaggccaattaaacacagcacaacaaaaaaaaagaaaaataaaacaagggaatctcttctgcaaatcagagttcacctcatgtccatcttcagacatatttttctaatttttttagaaaaaaaaaaatcaagaacccgtttctatggtgtcgaaatagtaggtgaccggcacctgtcgtgtcctctgtgacctgtcagaattttctcaatttcttggtgaatggtgatggccttatgcactgtcagaataaaccctccaagaccaatcacaacatagaaaatccttttgtttttgaactttgggatatgaaagcctgagttatgaatttcttatgcatacgaacttacgaagcattttatattttactcgtaatagatagagaaatgagaacagcaattctgcatttgtgaacttgtaggagtgtcgcagctgttgccaactgaatcaagaaccgagatttggcaagtgatgaagacccacgcgacaagctggggtcatagtgctcgcctaccctatcaatactattgcaaatcgtggcaagatcatcaagttttgcactaggggatagcatggcatgtgattcagttttgatctccaattccgtacttttctctccaacagtccaactttcatacttgttctgcacactgcaggtgggacacattgcactgaaccaatacatctgtctcttcaaatttctcttttgggccacaaagactattggacttgctttgtttacaccactcgttggacatgggcctctaaggaagcaggtgtactctatatttaattttattaaaatctgtcaagcaactaaaagagcaagcctgcttgaacaatccaccatgaagagcacattactgtctaacatggcttatttcaagatgattactgtctaccgtaatgatgaagtccaactatgcatatataattatataaatgataaagaaataaaatgtagggggaaaatcaatggcactcgcactcagagttggaaaaatgaatcagtcagcttcagcgcagaaagagagctgacgctgaaacgcatccgtatccataaaactgcttcatccagctaataagtgagagggacattgtccataggttttatccaaaacgcatctttctctgtctaatgaatcaaagctgaaagctctgctaaccctgaccattcacaataatactgtcgtgtatttgtttatcagaaggaacggtgagtgggaaacctgtgatttcttttgtgatcagttggtgatggtaccaagaccaagaagatgtggttagaaatttcagctagtgtcctttgcattttgtttgtatacaacaccacacactttgtgaccactgaccagtggccaacttttgtttagttcaacggttcaggccggccttccggcgggcacctaatacactaattaatactactattgtagctaacctcaaaagaaatgcatgcatttgcagttgtctgtcctaatcaactactagcagagactcacattattgatggatggaggaaattaagttcagcctttgacgtggatgcaacaactgcacaagataccgtcttagccgttgtgtcaaagtttgctttgctaacgttttgataagaaaaccagctttgactaacacgagaggatgagcgccttacgtttggcataatgtattgtagtccggcacggcaagttagactctgtagtgttagccgcccggcctctttacgtttggcacaatttagggcacgttcgtttccaatagaaataaaaatagcccaggaattaattcaattcgtgaagtttatataattttaactagcattcctggatttttttttccaggtgcttattcctagcgtaacgaacgagcccttaattgaaatttggcatggcaagttagactccgtgtgagccggtcaccgcaagttatgacgaagacataatccttgaggcactttttacgcaacctcatgttgtcaatgtttcttccggtacattacactataattttatttttctctagtatgtgcgactatgtgagtaataaatttagatcttagaaagggagaaaaataatattgctacctactagtttgaagattatacatcttctttctctaaacgttttggtctgctacttaagccatctttaaggctaattgctcaagattcaacaattgggacgtctcaaatgatcaaatcctataaggttgctaaggtcttattgttccaattccagctttttggatgaaaatttaccagtgtcttaagaagtagtaattcacgagagaagcaagttcaaaaaaaaaaatcacgagagaagctttaaagagtgacaggaggcgcccgtttaacggcgtcgacaagtctaacggacaccaaccagcgaaccaccagccacctaagcatgaaaacggaacggaaatcccgaaccgctttctatatttgatccgatcgaattcgtatttttttatccgactttatcgttttcgtattttagatgtttcgtattttaaatgtaaaagtagaaaacagttttgatatttttcgaccgttttctacttttctacttttaatttgaaatattttgaatttaaaatttggtttaaaccaaatttagtcaactatagtgttacacagctcaattacagactactcaccatgcatctgcgttctttctaccggtggctagttgcgttcctgctagctattaattgcttattctagacttgtatttatgtgtgggctattttattaaatacctaagaccaaggatcatgcactttttaattattatatgtacttgaacttgatcctatatatacttagtcatgcacttggtactatatatcggtatttcgtattaagtttttgtatatcgaccgtgttcgacataaatccgatcgaattggttcgttttcgaaattctcgatatttcgtaagttcgtgttccttttcgtgtccgactttatcgttttcgttttcgtattttaaatgtaaaagtagaaaacaattttagattttttcgaccgcttccaccaccgcaccagcgccgagatagcccagcgaagcaaacggccgagacggtacccccctctcgagagttccgctccacctccaccacgggggattccttccccaccgctccttccctttcccttcctcgtccgccgttataaatagccagccccgtccccggcttctttccccaacctctcgtcttgctcggacttcggagcacacgcacaacccgatccccaatccccctcgtctctcctcaccggcttcgcggatctccgcttcaaggtacggcgatcgatcatcctccctccctctctctctctctacctaatcttctttagatagactagatcggcgatccatagttagggccttctagttccgttcctgtttttccatggctacgtggtgcaatagatctgatggagttatgagggttaacttgtcatgctcttgcgatttatatatagtctctttaggagatcaatttaatctcggatggttcgagatcggtggtccatggttagtactctaggctgtggagtcgggggttagatccgcgctgttagggttcgtagatgtaggcgatctgttctgattgataacttgttagtacctgggaatcctgggatggttctagctggttcgcagctgagatcgatttcatgatctgctatatcttgtttcgttgcctatccctttttatctgtccgttgtatgatgttagcctttgatatatttcgtcttgtgcagcacttaattgttaagtgataatttttagcatgcctttttttttatttggttttgtttgattgtgctgctgttctagatcagagtagaagactgtttcaaactgcctgctggatttattaaatttggatctgtatgtgtgtcacatatatatcttaataataaagatggatggaacttttatatattttgctgttggttttgctggtactttcttagatatactctttttggatatggataggtaaatgcttagatacatgaagcaacgtacagtttaataattcttgttcatctaataaacacaaataaggacgggcgtaaatgttgctgtgggttttactggtactttcttagatatatacatgcttagatacatgacgtaacatgctgctacagtttaataaatattgtttatataataaacaaacatgatgtttattatcttggtatgcttgggtgatgttatatgcagcagctgtgtggatttttaaataccctgatgatcatgcatgaccttgccttagtttgctgtttatttgcttgagactgcttctttcgcttatactcacccattattttggtgacttctgcagatgcagatctttgtgaagaccctcaccggcaagactatcacccttgaggtggagtcttctgacaccatcgacaacgtcaaggccaagatccaggacaaggagggtatccccccggaccagcagcgcctcatctttgctggcaagcagctcgaggacgggcgcactcttgctgattacaacatccagaaggagagcaccctccacttggtgctgcgtctcaggggaggcatgcagatcttcgtgaagacccttactggcaagacgatcacccttgaggtggagtcctcggacaccatcgacaacgtcaaggccaagatccaggacaaggagggcatcccaccagaccagcagcgcctgatcttcgctggcaagcagctggaggatggccgcacccttgcggattacaacatccagaaggagagcaccctccacctggtgctccgcctcaggggtggcatgcagatatttgtgaagacccttactggcaagacgatcacccttgaggtggagtcctcggacaccatcgacaacgtcaaggccaagatccaggacaaggagggcatcccaccggaccagcagcgtctgatcttcgctggaaagcagctggaggatggccgcacccttgcggattacaacatccagaaggagagcaccctccacctggtgctccgcctcaggggtggcatgcagatctttgtgaagacattgactggcaagaccatcaccttggaggttgagagctctgacaccattgataatgtcaaggccaagattcaggacaaggagggcattcccccagaccagcagcgtctgatcttcgctggcaaacagctggaggatggccgcaccctcgctgactacaacattcagaaggagagcaccctccatcttgtgctccgcctgaggggtggtatgcagatctttgtgaagaccttgactggcaagaccattaccctggaggttgagagctctgacaccattgataacgtgaaggccaagatccaggacaaggagggcatccccccggaccagcagcgtctgatcttcgctggcaagcagctggaggatggccgcacccttgcagactacaacattcagaaggagagcaccctccatctggtgctccgtctccgtggtggtcagtaagccataggtcgtttaagctgctgctgtacctgcgtttgtctggtgccctcttgtgtacctgcatatggaggttgtcgtctattaagtatctgtggtttgttttagtcgtgactgagttggtttgaaggacctgttgtgtcttgtgtcccgtgtgtctacccaaaactattatgccgcagtatggcttcatcatgaataagttgatgtttgaacttatataagtttgtgctcagtatgttttattttaggttatatctccttgaaaactggcgcggccttgccgtgccccatctcaataggccagttccatcgttgtagaacttaatataaatagtgatactaacaaaataaagaactgtgctgcttagaatacatagactatttgaaatcatgcatggatacataatagcatatacaacaaaagagaagcaagatcatgcattgtgctatacaccaaacaactattgctagattactctttttctcttactgttatgtatttgatttcgacattgcagctactgctatgtatcccgttgacaacctattcatttcttgtttctagcaagtggcagtgggcagcagtcgatgcagctgcagattgaccggagcgatctcccatattgattgtatccatcaccattaaggccttgtttagttccattttcagatttctcgtaatattgcttcatatgcatgaagcattaaatataaataaaaaataattaattatataattaatttgtaatttatgagacgaatttttttaaacctagttactatatgattagacaatatttgtcaaatataaatgaaagtgctgtctattttgcaattttttttgaactaaacaaagcctaaaattgactggagctaccttcacccagactgattggaatccatctcctgaaaacgtgtaccggaaaacttcagcaaactccattagggcctgttcgtttcacaaggaatggacgccgggattgattccaacttgaaatcttatgataatttgtattagatttgatctccaggaatgaatccagaaggaaggagggcaaaacgaacgtggtcttaggcatgaagcatcatcgaggaggcgactatacgcatgagaaacatggaaaatacagagaggatgagctcagcctaacggattgaagcgaatggggtctctcctcgtcacatttgactgaggctcaccctgtgtcattgccacagcagcctcggcgtgctggtcctcattatcttcgattgaagctcgcctgcgccattgccaccagctcgtcatgcattttgggtgtatacaacaccacatacactttgtgaccatgaccaacacttttgtttagttcaacggtccggccttccgggcacctaataatacactaattaatctattgcagctaagctcaaaggaaatgcatttgcagctgtctgtcccaatcaatccactagcagactcatattattgatggaggaaattaaattcagtctttgacgtagatgcaacaactgcacatgatacgttttgagaaaattaaaccagctttgaccaacacgaaatgagcgccttacgtttggcacgtactccggcacggcaagttagactctgtatgtagtggtagagccggcctccttacgttgggcacagttttagttgagcccggcatggcaggttagaccagagtgtgagccggccaccacaagttattatttataacatatatataggagcaagtgcacataacaaaataattagcatgttcgcttgagcttatcagccgaatctgtcaatcatttagcagtgtttttcttttttaaaaaatcagccaacaatacttctgtcatggcttccaaacaaacaagcgaatgtgagcaaactatatgaattgtcacgtcatatttatgttgagatgaagaagagaaataaatggcatgtaaaattatagccagtgatagacgagcacaaggccttctattcttaaatcagactttgaaagaaaaaaaaaggacttgaatgggagacacgagtaaggccattttttttgtaagaatgggttcttaaaaaaattttaaaaattttcaagattttcagtcacatagaatttttggacatattcatagagcactaatatagataaaaaaataactaattacacagtttgtctgtaatttgcgagataaatcttttgagcctagtaagtccatgatcacacaaaaattatcaaatacaaatgaaagtgctacagtagctaaacctaattttttttgaccgactaaacaaggcccaaaattgttaaatttactcaggtgacacggcattaacgatagtaggtagctaaattaatagtcatactctaacagctatagccgagaaggctaaacaactataaccgtctggctagctaatggtcgagtgaggcccgtatagatgtagttaaatagctaaaatttttggagaaataagcatttttttggaagaatatatttaaacatgggcttgtaaaacttggctgtaaagatttggaatttaggatcttggagccccaaaactgtataaacttgcttagggacccgtgtcttgtgtgttgcagaccaaaaaatttagaaagcatctaaacacctatttgaatgtaaagtttacagccaaaagttttaggatgtaaagatttgggatctaaaagtagtcattaggaaataacacgttagagagagagagtagatcttcttattggtttctcatgcactaatcgaaccaatcactggaccacttgaaccaaactttatcacattgaactttgtcagttcagttcgaacgcaggactggagctgcccttaaggccaattgctcaagattcattcaacaattgaaacatctcccatgattaaatcagtataaggttgctatggtcttgcttgacaaagttttttttttgagggaatttcaactaaatttttgagtgaaactatcaaatactgattttaaaaattttttataaaaggaagcgcagagataaaaggccatctatgctacaaaagtacccaaaaatgtaatcctaaagtatgaattgcattttttttgtttggacgaaaggaaaggagtattaccacaagaatgatatcatcttcatatttagatcttttttgggtaaagcttgagattctctaaatatagagaaatcagaagaaaaaaaaaccgtgttttggtggttttgatttctagcctccacaataactttgacggcgtcgacaagtctaacggacaccaagcagcgaaccaccagcgccgagccaagcgaagcagacggccgagacgttgacaccttcggcgcggcatctctcgagagttccgctccggcgctccacctccaccgctggcggtttcttattccgttccgttccgcctcctgctctgctcctctccacaccacacggcacgaaaccgttacggcaccggcagcacccagcacgggagaggggattcctttcccaccgttccttccctttccgccccgccgctataaatagccagccccatccccagcttttttccccaatctcatctcctctctcctgttgttcggagcacacgcacaatccgatcgatccccaaatccccttcgtctctcctcgcgagcctcgtggatcccagcttcaaggtacggcgatcgatcatcccccctccttctctctaccttcttttctctagactacatcggatggcgatccatggttagggcctgctagtttcccttcctgttttgtcgatggctgcgaggcacaatagatctgatggcgttatgacggctaacttgtcatgttgttgcgatttatagtccctttaggagatcagtttaatttctcggatggttcgagatcggtggtccatggttagtaccctaagatccgcgctgttagggttcgtagatggaggcgacctgttctgattgttaacttgtcagtacctgggaaatcctgggatggttctagctcgtccgcagatgagatcgatttcatgatcctctgtatcttgtttcgttgcctaggttccgtctaatctatccgtggtatgatgtagatgttttgatcgtgctaactacgtcttgtaaagttaattgtcaggtcataatttttagcatgcctttttttttgtttggttttgtctaattgggctgtcgttctagatcagagtagaagactgttccaaactacctgctggatttattgaacttggatctgtatgtgtgtcacatatcttcataaattcatgattaagatggattgaaatatcttttatctttttggtatggatagttctatatgttggtgtggctttgttagatgtatacatgcttagatacatgaagcaacgtgctgctactgtttagtaattgctgttcatttgtctaataaacagataaggataggtatttatgttgctgttggttttgctggtactttgttggatacaaatgcttcaatacagaaaacagcatgctgctacgatttaccatttatctaatcttatcatatgtctaatctaataaacaaacatgcttttaaattatcttcatatgcttggatgatggcatacacagcggctatgtgtggttttttaaatacccagcatcatgggcatgcatgacactgctttaatatgctttttatttgcttgagactgtttcttttgtttatactgaccctttagttcggtgactcttctgcagatgcagatctttgtgaagaccctcactggcaagactatcaccctcgaggtggagtcttctgacaccatcgacaacgtcaaggccaagatccaggacaaggaaggcatccccccggaccagcagcggctcatctttgccggcaagcagcttgaggatgggcgcacgcttgctgactacaacatccagaaggagagcaccctccaccttgtgctccgcctcaggggaggcatgcagatcttcgtgaagaccctaactggcaagacgatcacccttgaggtggagtcctcagacaccatcgacaatgtcaaggcaaagatccaggacaaggagggcatcccaccagaccagcagcgtctgatctttgccggcaaacagctggaggatggccgcacccttgcggattacaacatccagaaggagagcaccctccacttggtgctgcgtctcaggggaggcatgcaaatcttcgtgaagacccttactggcaagacgatcacccttgaggtggagtcctcggacaccatcgacaacgtcaaggccaagatccaggacaaggagggcatcccaccggaccagcagcgtctgatctttgctggcaagcagctggaggatggccgcacccttgcggattacaacatccagaaagagagtaccctccacctggtgctccgcctgaggggtggcatgcagatctttgtgaagacattgactggcaagaccatcacgttggaggttgagagctctgacactattgacaatgtgaaggccaagatccaggacaaggagggcattcccccagaccagcagcgtctgatctttgccggcaagcagctggaggatggccgtaccctcgctgactacaacatccagaaggagagcaccctccacctggtgctccgcctgaggggtggtatgcagatctttgtgaagaccttgactggcaagaccattaccttggaggttgagagctctgacaccatcgacaatgtgaaagctaagatccaggacaaggaggggatccccccggaccagcagcgtctgatcttcgccggcaagcagctggaggatggccgcacccttgcagactacaatatccagaaggagagcaccctccatctggtgctccgtctccgcggtggtcagtaagccgtgggtcgtttaagctgccgctgtacctgtgtcgtctggtgccttctggtgtacctgggaggttgtcgtctatcaagtatctgtggttggtgtcatgagtcagtgagtcccaatactgttcgtgtcctgtgtgcattatacccaaaactgttatgggcaaatcatgaataagcttgatgttcgaacttaaaagtctctgctcaatatggtattatggttgtttttgttcgtctcctaa

SEQ ID NO: 252 - DNA, 15512 bp, Solanum lycopersicum; identical to SEQ ID NO: 251
  source 1..15512: mol_type = genomic DNA

SEQ ID NO: 253 - DNA, 3035 bp, Solanum lycopersicum
  source 1..3035: mol_type = genomic DNA
tctcgacctactccccaaatcattcttcttctctagcgcaacttctctcggaaaaaggcatctcctcctcctctcgttctctcgataatctccttacgcactagttcttcttctcaaggtaatggtctttttcttctatcgattcaatcgtttgttgaagagatttagatttatgcaggtttttgtatcataaatgtatgaacagtattatatgaacggaatttacctttgttttgttgtttatcgattagatctgcacggaattagtcgatttgagaagtttttaggatggattatgtatgtttttttctgttgatgatgttatggcgtttaatttcgtttgatttgctagagttttggtttccatttggtagaatttgttgaagttttgtggtatgattagtttgtgtcgtatctagggtttttttatcacaatttgaaatggtgatgcttgcctttctgttgatgatttatagccttgaatttcgtccatttgcttgattttggtcactgtttaatagaaattgttcaagtttccaggtttgattaatgggtcctgtctagggatatctatgaataatttgaaaaaaacttccttttgatgtataatatatgctcttttttcttttatgttgatgatgttatagtcttgaatattgtcgtgttgttccatttggtttctatttgattgaaattgttcaagtttcccggttttattgtttgtgtcctagggatgtttatgattgaattacagaactaaattgaatggatgatgcatacttttgctgatgatgatttatagccttgaattttgtagatttgcttcatttattgtctccatttaatgaaattgttgaagtttctagcctctaagtttgattgattgtgtcttgtctagtttttttttttgcgaacaaattgaactagatttcaaacaaattgggagtctccaattttttgtttgttaactcttattgatctgttttttaatgtttatttcttgtacgggcactttgttattctctcctgataattctacattttgaacttgatttgatctacaatatatccaatgggtttgcatccctctaaaatgattagtatagtttgcactaggtaggagggaaattgcagaacctttgttttactttattttctttttggatttgcaaagattgctagttttgccatctctgcctgatcttgaaatagaagttttgacagttgtgcttcaatatatttcagatgcagatatttgttaagacactcaccggaaagaccatcactcttgaggttgagagttctgacaccattgataatgtcaaagctaagattcaagacaaggaaggcattcctccagatcagcagagactgatctttgctgggaaacagcttgaagatggccgaacacttgctgattacaacatccaaaaagagtctacccttcatcttgtcctccgtctacgtggtgggatgcaaatctttgttaaaactctgaccggaaagactataactcttgaggtcgagagctcagacaccatcgataatgtcaaagctaaaattcaagacaaggaaggtattcccccagaccagcagaggctgatctttgctgggaaacagcttgaagatggccgaacacttgctgattacaacatccaaaaggagtccacccttcaccttgtccttcgccttcgtggtggtatgcagatctttgtcaagacacttactggaaagaccatcacccttgaagttgaaagttccgatactattgacaatgtgaaggccaaaattcaggataaggaagggattcctccagaccagcagagactgatctttgccggcaagcaacttgaggatggaaggaccctggctgactacaatattcagaaagagtctaccttacatcttgttcttcgactgaggggtggcatgcaaatatttgtcaagacattgacagggaagacaattactttggaggttgagagttcagatactatcgacaatgttaaagcaaagatacaagacaaggagggtattcctccagaccagcagagattgatctttgctggaaagcaacttgaggatggaaggacgttggcagattacaacattcagaaagaatcaaccctgcaccttgttcttcgccttagaggtggcatgcaaatttttgtcaagactttgactgggaagacaattacattggaggttgagagttcagataccattgacaatgtgaaagcaaagattcaagacaaggagggtattcccccagaccaacagcgtttgatctttgctggtaaacaacttgaggacgggaggactcttgcagactacaacatccagaaggagtcaactctccatctggtgttgcgtttgagaggagggatgcagatctttgtgaagactttgactgggaagacaatcacattggaggttgagagttcagataccattgacaatgtgaaagcaaagattcaagacaaggagggtattcccccagaccaacagcgtttgatctttgctggtaaacaacttgaggatgggaggactcttgcagactacaacatccagaaggagtcaactctccatctggtgttgcgtttgagaggagggatgcagatctttgtgaagactcttactgggaagacaatcacattggaggtggagagctctgatactattgacaatgtgaaagcaaagatacaggacaaggaagggatcccaccagatcaacagaggctcatctttgctggtaagcagcttgaggatggccgcacccttgcagactataacatccagaaagagtctactcttcatcttgtcctgaggctccgtggcggtgacttgtgaatgtcctgtgtgctgctgatttcatgatggctgtgtgctttgttgttttatttcatgacttttagtgttcttcgttatagtactatctttcttttaagagaccttgtaatgtgttatgttctgttgttttttgctgcaaccttaataaataaatattagccgataaatgtgttggtgactcctca

SEQ ID NO: 254 - DNA, 1284 bp, Solanum lycopersicum
  source 1..1284: mol_type = genomic DNA
ggatattctaaaatgcccacaagacataaatcatccccaaaaatcacgtgaattgtcttaaatatccccttttaagctttcgttctataagtaaagggttttgagccttgtcttcttttatcttagagttgaaggaagaatatgatgaaaggcacatcaagtgatcatcaaccgacaatggaaatggatgttcaaaagagtaaactctctttcatttctatctagttttcaattttttttctaactagaaaaaagtatggtgactttctattttctcgtgtaattatgaaatccaatggaagtttgtcaattatttgtggttaaaaaacaaaagatgattcaaatattggttgttgttttgatggtagagtacttatgttgtgttttattatagatccatggtcaggagatcgaacgatgccaattattattcaagatgacacttacagagacgtgatcaattggaagtcattaccaaaatcatttctaccaagtagtctagatctcacggaagaagatactagtatatgttcgaaatcaaaagtttttctcctaatggttgaaccagatgacagtatagctgcagtcaaagcgtatattcaggaggaaaaggggatttcttttaaaaaacaaaagttgttgaatgaagatgggggagttatgagagatgcacagacgttagagtctgcgggaatcaataaaggatctaccttaattcttcgatatgcaccaataacacaaatctatgtgttaacgcttactaatcgcaggtttaagttaatggttgagagtgatgacaccattgcagatgttaaagctgccattcaggaaaaagaaggtatccgatttcataaacagagactaatctataatggacgacaactcgaagatgatacatctctcgtagactatggaattcaatataacagtcaactgacacttgtcttgagattgtgcggttgttgaatattatggttgctttctaattgcataatctatatgcaaattcacttgttatttccgttggtttagatatatcttttatgatccatgtaaaatactgttattttcccttttgactctattattttgtatttttgctccagtttaaatggtgttatatatccttgaatggaggcgaggatcaatggcttgatacattattggagatttactttatggtgtgtttgatatgaaagggaaaaaatgtctgatggaaaatgtatttttagaaaataagtggattttttatttatgttttcatgctcgatttgtgaggatcaa

SEQ ID NO: 255 - DNA, 2956 bp, Solanum lycopersicum
  source 1..2956: mol_type = genomic DNA
cctaaattttctccaccgatcaaagaaaaggagacgtgtcatactattattggttacttcattggcaatttcttcacaaattggccattaacaactataaaaggaggctctctgtaaccccaattcattcattgatttctcatctcttcaaattcttcagaaaaaaaacctctcaaggtatacttttccttctttttagtttttttgtttattttttctatattttgtgctatttgttttgttgtgtctgtgtttagaatcagaattctgttttaaaaattcaatttttatgttgtttgagtgctgtgtatgctttaattttctgtattttttattgtgtctgtgtttagaatcagaaagggtgtttgaatctgttttaaaaattcaatgtttatgttgttttagtgttctgtatgctttaattttctgtatttttttgctatttgtttattgtgtctgtgtttggaatcagaaagggtgtttgaatctgttttaaaaattcaatctttatgttgtttgagtgtctgtatgatttaattttctgtattttgtgctatttggtttattgggtatctaaaaaagttggatcttgattttgttttcaatattctgtatgctttagttttctgttaattgtgttatttgttgtgtttgggtctggttttgaatcagaaagggctttttaattttgttctaaaagttaaatcttgattttgtttcaacctggtgtgtgccttaggtttctgtatttatggacttggaaaccttttaatgatctaaaaagattgtattttagttttgtttatgagctgaaaaaccatacaagtatgatctgaaaagttgagtcttgattttgactcaacttctgtatgtgttgttttggttatatgatagccgctgcttcatttcgttttctgttttttttttgtttgtgtgagctgagtttctatagcaatttcgcatacaccctctccgtactccacttgtgggatcacttgcacaatctatattgttgttgttgtatttttgacctgtgtgtttctgttgtttgtttgtttatgatataaagaaccttcctatttctatttgtaagaactcaatcttgattttggtttcaattttttgttgatgcaccaagttgaattttgtgtggtttttaaaatagcctctgcttatccctttaaatttctgttatttgtgttgtttggtctgtgtttatgatctaaagcctgtcaattattttgttttgaaaaaattggaagccttcttattggatgatgattatgaatggtgttctgttgggttttgatttgtgatatgaaatatcaactttaatctgtcatctcgttttatagagtcatgtctgtgtctattcgagtatgtgtgcttattttgttgaattttgtgtacagatgcagatatttgttaaaaccctcactggaaagactatcacccttgaggtggaaagctcagacaccattgacaatgttaaagccaagatccaggacaaggaaggcattcccccagaccagcagaggctgatctttgcaggaaagcagcttgaagacggtcgtactctagctgattacaacattcagaaagagtcaactctccacttggtgctccgtcttcgtggtggcatgcaaattttcgtgaaaactttgacaggaaagaccatcacccttgaggttgaaagctctgacaccattgacaatgttaaggctaagatccaagacaaggaaggcattcccccagaccagcaaaggttgatctttgcgggcaagcagcttgaggacggcaggacccttgctgattacaacatccagaaggaatcaacccttcacttggtgctccgtcttcgtggtggaatgcaaatttttgtgaagactttgactggaaagaccatcacccttgaggttgaaagctccgacaccattgacaatgttaaggctaagatccaagacaaggaaggcattcccccagaccagcaaaggttgatctttgcgggcaagcagcttgaggacggcaggacccttgctgattacaacatccagaaggagtcaacccttcacttggtccttcgtcttcgcggtgggatgcaaatctttgtgaagaccttgactggcaagacaatcacccttgaggtggaaagttctgacaccattgacaatgttaaggccaaaattcaggacaaagaaggtattccaccagaccagcagaggttgatctttgccggaaagcaacttgaggacggccgtacccttgctgattacaacatccagaaggagtcaacccttcacttggtcctgcgtctccgaggtggaatgcaaatcttcgtgaagaccttgactggcaagactattacccttgaggtggaaagctccgacaccattgacaacgtaaaggccaagattcaggacaaagagggtatcccaccagaccagcaaaggttgatttttgctggcaagcagttggaagatggaaggacattagccgattacaatattcagaaggaatcaacccttcatcttgtgttgaggctcaggggaggtatgcagatttttgtgaagaccttgactgggaaaaccataactttggaggtggagagttctgataccattgacaatgtgaaggctaaaattcaggacaaggagggaatcccaccggaccagcagagactgatctttgcagggaagcaacttgaagatggaaggactctggcggactacaacatccaaaaggagtctactttgcaccttgtcctccgtctccgtggtggtttttgaaggggtctgttgctgttggtgttttgtgtctgtctgttgctgtgtttgttcatgaactagtctgtttacttgtgaccttgtgatgtgttgtgaactcatgtttttcttatagtgaataataaggaactagtctggtttaattatgtttggcatcaaggttggtttactta

SEQ ID NO: 256 - DNA, 2492 bp, Solanum lycopersicum
  source 1..2492: mol_type = genomic DNA
cattgaaacaaacgggtcttgggtttaagcccagattattatttgcaagcccagttgagggcccatattggaactataaattcttcataaaccctaaccgccatttttcttccttcagctttcagtgtagcggcactttttcaccttcaaatttgtaagttccaatttctcatatcattttttgtattgtagaacacaattgtatttagtgatttgaatattttgctcatattttattgattatatgttgttcgatgtgattttagtaatttttacatgttaatttggtatagaatagacccgagctgcaattttgttgattgaaatagatgctcagttgattgattgatgaaagatttgttctttgtttgatttgacccgaattgagcaaaatggatagcttaagagtgttcatatggctaaactccattattcatgtactgttgtttcttgtgatttttacatgttaatatatgtttctcatttaatatgggctaggctataatagactacatagttatagaggaactgtagttttatgtattgaaatagatgcctagttgattgattgatgaaagttgtgttttttgtttgattggatctgaattgagcaaaatggttgttgagtatttatgttgcgcgaactcttcacttttgatgccgcacccttgttggattcttgaaaaatgcactattcttttagaatccgatacacacccattgccatttctgaagagtcagagcaacataacagaatattcattttgttagacctatgtgcttgtatagaaacttctaactttcttcattgaaacagatgcctagttgattgatgaaacttctcttattatttgattagacctgaatagagaaaaaatggtacagaaggtttatgtattcattgattttgccaagatagaagtgaataatgtcagtgtattcatatggctgaccccattttcaacatatcattgtttcttgtgatttttacttgttaatacacgtttctcgtttaaattgggctaggctatactagacagacgtagttatagagggactgcaatctttttctttgaaacagatgcctagttgactgatcaatgaaagatttgtttgtgttgcctagttgattgatcgatgaaagatttgttctatgtttgatttgacctgaattgagcaaaatattttccccatatcattgttttgattttttacaatctaaacaagtgttcgtttaaattggccccaaatatgccttaatggttacagaaatagaagcctagttaattgattgatggaatgtccgtatatagtttgatattatccaaatagagcaaaatgttagtttttgtttgtaattgaggtgttgtccttggtttggctcggggtgtaattgaatagttgcatataattcatagctgactccctttcacgcacacgatatcatggtttcttgtgatttctttaagttatatatgttcctttgtctaatgtggttatagaggaactccagtaacttcatcgctacagaggcttagttttttgattgaaggaatattcgtatctatgcatcgtatgtagttgtagtcggtgatttggctcaagtagaattgaatagttctagagctctaagataaaacgaagtaaatagttgcaatggtgacgcaggaaacttttttttgttggaatagagacttagttgataaatatctgtgctttgtttgatttggtcggaatagtgtgaaataagtgcaagggatttatacagtcgactcccgctttgtttataattgtgatgtagtcattattaatatattgaatatatgctctttgttgagttgtgcagctggtgcaccaagtggtgaaaaatgcagatctttgtgaagaccctgacgggcaagaccattaccttggaggtagagtcatcagacaccattgacaatgttaaggctaagattcaagacaaggaaggcattccaccagaccagcagcgattgattttcgccggtaagcagctcgaggatggccgaacgctagctgactacaacatccagaaggagtccaccctccaccttgtcctccgtctccgtggtggtgccaagaagcgtaagaagaagacttacaccaagcctaagaagatcaagcacaagaagaagaaggttaagctcgctgtcctccagttttacaaggtcgatgattctggcaaggttcagaggctccgcaaggagtgccccaacgctgagtgtggcgctggaaccttcatggctaaccattttgacaggcactattgtggtaaatgtgggcttacctatgtttaccagaaggctggtggtgattagacaagtgttagtttggctattactttatcttagattttgcccacatttgtgtccctatactctcctttcaatgttttgtttgtgacaagatgggattattttgcagcttataaaaagctatggattttgtcagctaaaatattttccacctct

SEQ ID NO: 257 - DNA, 5527 bp, Solanum tuberosum
  source 1..5527: mol_type = genomic DNA
tttttagggccaatagaatagaacaaataaatagggttccaattctttttccttattatttcatccgaatttttgtgcttaataaacttagcgtaaagggaacgagctgtttctgtaggagccaaatcgatcgatcgatcgatcaatcaatcaatcatgcagatctttgtgaaaaccctaaccggaaagaccatcaccctcgaagttgagagcagcgataccattgacaatgtcaaggccaaaattcaggtactattttcattcttcacaattttgtgctgttgttttcataaattagggttttgcatcttgttatgtgtgtggagattgatatgatacgtataattgctcaacgtgtttgtgtttgtcaattcgtgatctcaatagttgattttgttctatatgtactaactttggtggacatagttaggcactgatacttgttgcgggtgtgaggtgacaggtatcacgtctcaatggcttgttttgggttaaaagggatgtgggtgggtgggtttaatttggttttacttaatttagatggattttttgcttttttcactgatttaattaatgatgtggacgcatcatagttggcctcaagtacaaagcatatgttaaaaccagatatgttttccgttaaaaaatactggcattaatgacatttatttaatacactagttttccggatatacactagctgatttcgtctcatccatcctagatttggtggacagagtcacctaatacatgttgtgcgagtgagtgttgtgggagtgaggcaggtattccgttggaattagtcattaaaaatttttatctagttgcaccaactctaaacacttgctgattttgtaccatctgttgtagatttggtggacatatttacctgatacatgttgagggtttgaggtgacaggtatctcgttggaattagtcatataaaaaaatatagttgcaccggctctaagcactagctgatttagtctcatttatcctagatgtggtggacaaggttaccttatacatgtagtgggagtaacattgaaattgatggagtatttcatatacttaagtatgtttccaataaaacaagatactttcaaaccctttttggtaatacatagccccttggactaactttttgtgggtgaaggatgtatcataacctttatctatgtcttatttttacgaaaaagggtaaaagatgtcctaaaactatgtgaaattgaacaaaaatgtcatcgattaatagtttggtcctaaaatgcccttgccatctgtatgaagtttgaacaaaacctctttcatcctattgggaaaaatattttgtattatatcaggaaaaagaatgacccggggttctcacgggctgagtcttcgtggaagttatggattcggtaaaatttagtaactttagctcaaactttatatgtgtgttaaatatttcttttgatatagataaataatcttcttttttttttttgataaaagtaacaggataaataatctattcaaaattcagaaagtaaaaataatttttgtaattctgaattcataaattaaaaaatctaactccggcaatgaggaacctattttaatttagaagagacccaaattttttattacagaaacctgagttttaaatgacacatttgtttgtagtactttgtaaaacaataaagatactaaactatataattgaaaaagatttatatagttgcacccggctctaagtctagtgaaggaaagtggtagtcatgataattaaaagatgctaattagttttgtttttttgagaagcaaaaatgctattttgttaatgttacatgttatttttattttgcaagtgttgatctttccattgcctgctgatggaaactgaatttgttcctcataagctttattccattagatacggatggtctgtcaaatacagtaccagaaagcttgtcttttggagcctcaatagatacaggcttttattggcacatacaatgcacttagtctggattgtccttgttgtgcataaatgggatatgcacttcaaattgatgtccaacttatgaatgataaactctctaaagctacctgcatcacctttaactcacttttgtcttttcttttgaaaaaaaaagaactttcctatgcctctttacaggtggttaaatatattgaattatacgaatgtcctgaatgtaaacacaccagatttttttatttttttttgataaccgagaaatccgtatgtgacccgccctttggaccaatcacagccttctaaactcggtggataatgggcccgcccctctacccttctccacttaaataccaggctttgctttgcatggtgtgggtcttgaacctgcgacctaagtcacaaatcctccaccttttgccacttgagctaggccttggaggcaaacacaccagattttgattgcatactttcagcaatatttgatagaaaacagacagaagcatgcaatgatgtgttagcaccagaatgtagtcttgtgtgtgattgatggtagcttaagtttaactattctactgtttgttcttctctttttgataaatatttgttctggagcatttatcaccttggatggtccacgttaagtccctgtttcactttcgaaggttatcttcacttcttgctggccctttctaatcttcctcgagatgttattggagtgaatgtacatcatgtgaagacgattgatggtgctatcacactctttatgatatcccttaggccactgttacaagatattcacctgtttggagcttgttttgaagctttttatcttgtttagacactaggtatagtgaaccccttgtcaagtaggtcccaaattttctctttcagttcttttagtttggatggagcctttcattacggaaggaaatgggtaaagtctgtcccagatgctagagatctatgctccctaaaccatgggttttcctatttctgaggctagaggaactcgatcaaatacagctcaggcctatgctaaggtttttacttcctaactagtttatttgaagtcaaccttaatattgtaagatatgcattgccaaaatatgaccaacccacgaaatgtaagagcccgccataacacacaaggaaaacctcataatactgtcaaagctatggtctttgaattacaactgtacatacattaacttctaattgcctaaaatatgtgatttgctgcatgttgtatggtcaagtgttgccttctgttcagtttcccccccttcttctgctatctctgcactgacctatcctgggtttgtccacttctcttctgtagtatttgttaactgttggcgttagtgctaacatgtaacagtcaatcttctgttcttctcatttcacgtagagctgatgtgttgcttaccaggataaagaaggcatacctcctgatcagcagagactgatttttgctgggaaacaattggaagatggtcgaaccctggctgattacaacattcagaaagaatcaactcttcatcttgttctgaggctcaggggaggaaccatgatcaaggtgaagactctcactggaaaggaaattgagatcgacattgaacccactgacaccattgatcgtattaaggagcgtgttgaggagaaagaaggaatacctcctgtgcagcaaaggtttgtatttcctttatttcattcaaattgcatacactagatttgtggttttcagtgtttgtgttttctcctctttcccatgccatactgcttcctctcccccacactatgagaccaaaagatcagtgatgttgtatgtgtgatgctgtgtgcctggcttatgaatcttctttggaattccctttaaatctgtgcaggttgtcatgtttctgttccctggtatttctagcattcccgtaataactgtacttttttaggacttaaaatgtcttctattattcaatgctctactatacccgattccataattgtaatcatccgtggaccatactgtgacaattgaatgtctcatatgatttgcttaaatgcagtgtattttaaggatagagggaatgtgaaatcctcatgtgcattttggggcataccctaggttttggatcatacaattgaacttttgtgtggcttacttgacagcataaaattaaagacttaatgacttgaaatatgtcaggtagttctaaaaaaaactagtagtgctgtaagcttaagagcgttgtaaatagtgggcgggtctaacaggtcttgcatctgcaattctgcttaatacattgtctagaaaaatcagcaggtcttacagatcttgtaatctgcatctgctctcattagccaaattttatcagcctaatttcatacctgcctgctagcattgccagaaaaatggtgggcatcctggtgtttgtttttctaagtttggtgtaaaattttattattatttttttggataattatgaaattcttggggtggttaatgattcgaaactctatcaacaatgttctgcccctctgcccttcttaaacacaaggtttttgtcttcagcagaattcgaacccaagatgtgcaccttaccaacatacccacatcacatattgcactcttaccactagaccgaagccctggagacattcaattctatctctccttttgagagatatttcgcttagtcttggcttcgtaaaaggattttcttgcaagtagacagatataacgaacatgcagtttgttataataatttggacaagtttgcttcttcccttccttatcagtgacagtgaatgccaaaaaaacagaactatatgagtgctcagtctgtttgtgtttgtatctcatccgattgagataatagaaaatatgaaaacattatatttctcttcattaaccattttgacagacttttttgttgtctgtcatgatcattatattactatagcacatcaggatatggcttttactggaataccatttcttagtttatggaaatccatggtgtactaattgagatgttgtaggatatcaccttcatcttatgggcagaaggtgaacagtggctcggagatattgaacttgttgatatatctatttttgtgaactacctacccagtttatctttaccctatgtgatagaagttgtgttcatagtttgttatttgtttttggcagtttgagacagtggatttacactttgtacttttggtttaatgcaggcttatatacgctggaaaacagctagcagatgacaagacagctaaagactacaatatcgaaggtggttctgttcttcaccttgttcttgcacttaggggtggcagactctaggttgcacttaacttggtgaaaacttagatgtcctgtctttattccatgaacttgggatgaacatttcttctcttcccttttttggtgatgtacgattggaataaacaggaaaaacttgtggttggttgaacattttgtgattgtctgcaccttatgttaaattcaggtttaatttgctaatatgtagtctcttttttttcccc

SEQ ID NO: 258 - DNA, 1959 bp, Solanum tuberosum
  source 1..1959: mol_type = genomic DNA
gtatcgtaattatgtttcgtgagcccacatcactatagtctataagccctcccctgtaacataactgataacacgaacaaagcccaccctcgcctcgcactggcttgacactccattgaagaagatgcagatcttcgtgaaaaccctaacagggaagactataacccttgaggttgaatccagcgatacaatcgacaatgtaaaggctaagattcaggataaggaaggtactcaattgttaaatcctaaatcgttttttttcttttttctcatttctttactgtgaaacataaaattggtgggtactttctaggcatccctccggaccagcagcgtttgatatttgctggtaagcagcttgaagatggacgtacgctagcagattataatatccaaaaaggtctgtgtgtaatgaaattggataatttaaattggtttatttgctagtttattttggttgatattttcttcaaacagagtccactctgcaccttgttctgaggcttcgcggtgggattattgaaccttctcttatggctttggcccggaaatacaaccaggaaaagatgatttgccgcaagtaagttcaatattcacacttgtagtattggaatgaagtgtacatgtgaatggattatagaatatttatgtagtcgattccaattaatcctgatttgagattgtaaagttgaagctattggtattttgcaaagtcttgatagttctggtaggttctatctgttgttcccctaggtcctgaacatggatgcataatgcattgctaatatgtcagaagagtaagcggggagaatgactgtgtagtgaaatgccatttttttttctgtgaggtcaagcttgtagatggctattcctgttcttgttctcactggtaatgcacggtgattgtctttcgcctctgtattctgcattggtacaagagtaatttatgtcatggtgatgacatggaaaagtaacctggaaggctgtcctggtggtcattcttagatatatgatgaccttgggtgaagttgtattgtcagacgaaaattaatgtctattagctgctgctatcgatttgtatgtatggagcattgtacttagctatggaattatgatcctttaccaacgtatgcacatgttagccaaagaaaaaactacaaagttacactttgaggacatgggagggacagaaacctgctaaatatttaccttccccttaaactattaacggtgtataggtttgccagtatagctcttctatattgtcctctttttgagctacttttgtaccatttggtagacatgatatggaagctatcctgtgcaaggtagtggctaggatatggtatgcatgacatttttctatttgctcaagtgactgttgaacagatcagtttttaccgtccttatctctagagggttgcatgatcattgcacaactaataaacttttggtgctaaaatgaagtcaattcctctatatttgtctaggccccatcactggtctacgcattatgatatcgtgttctattggtttaagttgcatgactaatgagttgtggtctttttattctttctgattgggtgtatttatgcattttcttttttgctgcaggtgctatgcacgtttgcaccctcgtgctgtcaattgcaggaaaaagaagtgtggccatagcaaccaggtatcttcttggtcaattttgtgaactgttgtgcattactagactccatactaaatgattcttctgtttcttacttttatttcagttgaggccaaagaagaagatcaagtaaacaggtgtttgcatttttgcagtcaagacactctatcatttggcactcttttgtattttatttgcttgtttgacttcgttccatccttcgatgtttgtttcactatataacataagttctaaaatgttagtacttccatttgctctactcagctgagttttgtcaa

SEQ ID NO: 259 - DNA, 1959 bp, Solanum tuberosum; identical to SEQ ID NO: 258
  source 1..1959: mol_type = genomic DNA

SEQ ID NO: 260 - DNA, 2264 bp, Zea mays
  source 1..2264: mol_type = genomic DNA
cgaatcggagatggcactggggcccacatgcagcggccgcaacctgacacggaggacctcgatgcgaacatgaacacctccaggtgcaaatatgcaaaacaaccacacgccctcttcgcttcctcattcctcaatcatcatattcttctttaatcaacactgcgagagcctccctcctcgttcggttcggacttttgcttcggcgacttcacgcggtaggccaccgtaaaccctagccccagaccgcgggtcgtagccaacgagatgcagctcttcatcttgacgctgacggggaagaccatcacggtcgaggtcgagagcagcgacaccatcgataatgtcaaggccaagatccaggtctgccacccctcccctcccccttgttcacctctacgactcccgattcgtagccgaattgtgtccttcgtgatcggtgataacatcggagtagtcgtgttgattgcttcatcgatttggtagttcctttagtgcggttcttaccctttgcggggaaatagatcttgggatagtgtctattggctgaagtatgaagattctcctcataactggcgcttatggtaattttttgctggttggtatcgtgccgtgtactgtcgacacttaagccttattcgttgtgatgaacaaacaaatttaggaaatttagtacctataaactgttatgtggttatggaagatgtaatatttccacaagcacctagcatagaattcttttcataataagaatgtaaagagttgaccccatactaatactgagtatcactatttatggcttttactccctcattgccaaattgtaagtcgttttgagtagcacaaactatgcacctagatcctagaaaaaccaaaacaaattacaatttggaatggaggcctccatattgcatcatggttgctacttaattaaaggccaagccatctttttttgtaatacttcgttttgtatactatgtgacttagtttaggaaaaccatgactttgatcttacttgtaacccggtcccattgcggaataacatgtttcttatcctctgttaggatttgcaaagtagcgagatattccttattttcgcttatgtttttggagtgcaactgctgcttagattctcaaacacattttaggaaataaaagccgactttgagtcatttctggtgaacaaaaaattgcctagtcaaaaacctcaatcggagctagctttggataacattgtccatgctcaagtaaattttatttgctaacacttgtccatgttcaatatttgtatcccacacctttgtccatgtgtgatcatttttcatgtatcatttgttttgccaagtgcatttaaatgtgaatcaaattccaaaacttgtgataatcaattttaagtaacactgattcagagacaggtgaaagaatgccattctaactcggcagggtatctgactttgtatttttcaggacaaggagggcattttgcctgaccaccagaggctgatttttgctggcaagcaattggaggatgggaaaactttagctgattacaacattcagaaggagtcaacactccctttggtcttgaggctcaagggtggaactatgatcaaggtgaagacactaactgggaaggaaatcgagattgacatcgagcccaatgacacaatttataggatcaaggagcgtgttgaggagaaagaaggcatcccacctattcagcagaggtactctacttgcccccaaaatctaaatgaatgtgaaacctttttctaagctccaaattcttgtaatcttttttagcattgtgtggtcctaataaaaatgttccatgcataggctcatttatgctgggaagcaacttgctgatgacaaaactgccaaggattacaacattgaaggtggttcagtgctccatcttgttcttgctctgaggggtggttgctagattaaaaagttcttgtagtttctgcttatggtatctgttacatggagttgtttcagaattgaagccttgtattgggtggttgattgtaccatgtgattagcagactactagagtcaggtgtcatctgtactgtttaagaaatgcttgaactagttcattcagttgtcaactcattcttattgccccggtctgccctttcacctaaatggctacatcaatcgtgttgtggtctattttctggttcccttgaattctcatcacttgcagactaagattgttggctaaataaattgtgtgtgtatctaatttttggttttcctca

SEQ ID NO: 261 - DNA, 3695 bp, Zea mays
  source 1..3695: mol_type = genomic DNA
ctgggagccttcatggcttcatgcgggggtcaagcagaaaaagcccagcccaattaaaaccctagacttcctggcgtgctataaaagcaggtggccgccgcctttgccttgctcaccctgcccttctgtgtacgaagccgacgagcagccgacgctaaagcttggtccggtgagcttcagagaaggggcgggtacgtcaagatgcagatcttcgtgaagaccctgacgggaaagaccatcaccctcgaggtcgagagcagcgatacaatcgacaatgtcaaggccaagatccaggacaaggaaggtagagtattgtacgcatccatttctgagttcatttttaccccgtttcccctgtcaggctatggctgattcctgtaccttgacgcgtgcaggtatcccgccggaccagcagcgactaatcttcgcggggaagcagctcgaagacggccgcaccttggccgactacaacatccagaaggagtccacccttcaccttgttcttcgccttcgcggtggcatcattgaaccttccctccaggcgctcgcccgcaagtacaaccaggacaagatgatctgccgcaagtgagctcttttctccaccgcgaaccagtaaaaattgtttgtggtgaatatattcattttttcgacttgtgattacgctaggatacctacatggaacatttttgtatccatgcgttccgttgtaattgtggtaggatgtgcagtcgtcgtgctgccactacagtggagctgtgggttattgactcgccgacctatatgtgtggcattgggttcacccatggctccagagattgacacccacccatactttgtcatctgcctagtccactccagcagttgattttcacgggtgggacatttcccattcctttgcgttcacttgtgactacccattatctttgtttcatagcaatcagtttgtgtccacttgtgacaatccactatctttgtttcaattgcattcagtgcattgggttggcaggagtgatgaaccaattagatgtgcgaagctatcttatgagcgtaacttttgaggcatacattctgtctgacctgccagtccacaacagtgttcgtctgcattctgctaaccttttataagtaacccattattgaatattggtgcactgctgctgctgtgttttcatgaagaagtggtctttgtttcaattgcattcagtgcatctggttagcaggagtgatgaaccaattagatgtgcgaagctatcttatgggcttaacttttgaggcatacattctgtctgacctgccagtccacaacattgttcgtctgcattctgctaaccttttataagtaacccattgttgaatattggtgcactgctgatgctgtgttttcataaagaagcggtctttgtttcaattgcattcagtgcatctggttggcaggagtgatgaaccaattagatgtgcgaagctatcttgtgagcttaacttttgaggcatacattctgtctgacctgccagtccacatcagtgttcgtctgcattctgctaaccttttataagtaacccattgttgaatattggtgcactgctgctgctgtgttttcatgaagaagtggtctttgtttcaattgcattcagtgcatctggttggcaggagtgatgaaccaattagatgtgcgaagctatcttatgagcttaacttttgaggcatacattctgtctgacctgccagtccacaacagtgttcgtctgcattcggctaaccttttataagtaacccattgttgaatattggtgcactgctgatgctgtgttttcataaagaagtggtctttgtttcaattgcattcagtgcatctggttggcaggagtgatgaaccaattagatgtgcgaagctatcttatgagcttaacttttgaggcatacattctgtctgacctgccagtccacaacagtgttcgtctgcattctgctaaccttttataagtaacccattgatgaatattggtgcactgctgatgctgtgttttcgtaaagaagtggcaaggaatgatgaatcaaatagttgtgtgaagtcttttcttcctcctataaaaaagaaaataattgccagagcaagcggccagctgggtgtggtcagcatggctagcttgggactgggagggtcatggagggcatggcccctgctcgcgcggccatggagtgggagctggagtggcaggttggagaggggagggtatcgtcacttccagggtcagtgtcagggagggagagggctgtcaggagcgggagcagatgcaggctttgttggagcagcaagtggcgagcgacgggaagatgaacttgcgagaaggaaaaaagaactgttttatgtgtaataacaagtgggtggtgttcaaccaaaggagtacgacgttgaaccctgcttttggctttctgcatttgaaatggtgaaaatagagcttttcacttttaggtagagacaggaagtagattttagtgtttgaaccaaatagtttataactttttcacagcccgcagcccacatcatttttttcatagccatagctcacaatagcttctttagaagcctcaaccaaacacactgaatcaagtaaatgtgggaagtaagcattacttatgagccatatatttgtctgacctgccaatcatcctgcctttataccacttcaagtttcctggttcttgttttttctcattgctgtgtgtttgatttttttccatggatagtttcttaaatactattaaatttgcatctggaaaatcttataatcattatgaacctagggtaatctaagtcctttatttgatccaggtgctatgcacggctgcaccccagggctgttaactgccgcaagaagaagtgtggccacagcaaccaggtaaacattgctcttgtgctagattcttgtttgtagtggcttacagtaacaaattgtcatatttttttttagatttgtatataagcaagatggtgcgagtcagctttaggcatgtagctcttgacttttcccttgagtcctagcaaatgtcacaaattcataatgtttggagcatcatctggttttctactcggtatatttgtcaagttagttactttggagaatcaagccgaccaattagatatagtaaaataataacttttgtgatactaggtacaactagaattttttagtatttatatttgatgtcataattctataatttttacctcaacaaagctttaatgccttgtaattagaaatttagtattctgtcgtcagctagttcatttttgaattaaaccgcgacaaatacaaaagatcagagagagtatctaattatgatgtgaacagttgaaaaatcacagtcgatggtttatttgttttgcttgactcttaatgtctcccttgtttctcccattttcagctgagggcaaagaagaagatcaagaactgaagcttgccaaatcggttccttgcatggtttgcgtcaacaagacgaagtttcaaagcttttgtagctgcataggctgctgcaacgtttttcagtcgtaactcgtgtgttcctgttcagggtcttcagcatgacataaatcgtttcagaagtctagtaatattattactatatggtgtcatgtcgtattgtggctcttcctttttgttgctgttgtgctgcagtagagggaaacgttccataa

SEQ ID NO: 262 - DNA, 4902 bp, Zea mays
  source 1..4902: mol_type = genomic DNA
tcaatggctgtccctgtccaccatatccaatgggccgaagagcacaaagcaaaacgcactgcccgattttgaacggcccatatcactcaacgaaaccctaaaaccgctgccgcaaccacgtataaaaacaccgcacgccacgccgccgccgtcctattcctcggagagggagaagccgccgccgcagcaatcacagcagcccggagaaagcccaggtccgacaagatgcagatcttcgtgaagacgctgacagggaagaccatcaccctcgaggtcgagagcagcgacaccatcgacaatgtcaaggccaagatccaggacaaggaaggtacgcgagcgcgccagcccatcttttggtagcaatagtattactagcatgtagcgcaggcgctaagaggctgtgtttgttccattccatagggatcccgccggaccagcagcggctgatctttgccgggaagcagctggaggatggccgcacccttgcggactataacatccaaaaggagtctacgcttcacctcgtgcttaggctccgcggtggcatcattgagccctcgctgcaggcgctcgctcgcaagtacaaccaggacaagatgatctgccgcaagtaagtcaccacctacgccttcacctttttaacacttctgtcaccccgaatggaaagtttgctaatattatggaacaattggatctataccattaaaagatccaaactttagatatataccatggaccccacatgtcattgactcatgtggacccacatgtaagtgagatagtaatggtatggatccaaagtggtgatcttttaatgatatggatccaaatttccctaatattattgttcgaaaacgtcatctcgaattatagcgacgaggattatttgtggtaactttgcatcgaatgtggaattgataaccacacgtgcatttacttctgcaggaactaatgtaggaaagatatttttttcgaactgagaggattccacatttgaattacgaaattaacgtcagagaccagctagctatccttaccaccacaagacgcctgaatcctaagaatcacaagagagagtagtaacgtaacagaaggtctaagagtgtgtttggtttgacttttggctttggcttttgcccccctaaaagccaaaagctaaccaaagggctggatccagaaagcagctttttctaaaagccggctttctcgtagtgcaaatctgaaagcacccctggacctgcttttagtggcttttcggatggaactgtgaaaacatatatcgaagaatttttaacgacttttagtggtttccaccaaacggtttttagctttttaacagctcacaacctacagcagcttttttcacagctcacagcccacaacaacttttttcacagccacagcccaaccaaacagaccctaaaccatcataagtctttccaaaaacagtacaactgctagaacttgcaagacaaccaccagatcgcaaaacaactgagggcttttaaatgtgcatgtatccacttcgatccatgtgggttggattggtttggtgtgggttttaaactaaccactacaacccatgtggattgaggtgaatatgtgtaccaaaacaaggcctaaaagaacatcaatcagcatcagcccagaactttgtcagttcttctgattatatccatccttgtcctgcggcaactgttgttcgcttcttgctaaggagcctcaccacaatatttagcattttattgacgccttcaaccagagccatcttgtcacaacaagtcggggtaggctagagttgaaacccaacagataccgaaacccaacagaaaccatctgtcaaggttcagccacatggataactgttttccatatattcttattcaagactaagtgcagctaacttgccacactttgactaactttttttgcctaatgttagttattcagggcctgtttggttcgtggctaactacgccacactttgcctaatgttagtcgtttaaattgaagaactaaccttaggcagaaaagttaggcaaagtgtggcaagttaggcagggacccaaacatgccctcaattcgaacgactaaccttagtcaaagtgtggcacagttagacacgaactaaacagaccctaaatctttgggtatattccaccctttccttttatccttcccatgcatcactcattacacattagtgccttgggatcttttcccatgaacgcgcatgcatataaaaaaggaacatattaggtgctcatagaactttggtgcatatattaaatcaagatcaagaccatccattttagatccaacgtcctctcacaacctccctttgttcacagatcagggtagaagtggtgtagagtgtttttgcaaaaatatacagtgtagcgagaggactgttggggagggtgttggatccagaatgaattgtcgcaatttaatatctgtaccatgtgcaccaaaggtgtcgcaggtacactttttatgttccctgtaaaaaatagtagcagggtcacatatttgtcttcaaagcttagtttgtcatttgtttttcatattgtccagcaaatagcagcaatccctacagcatggaaccttttttccagatgggagccatttttgaacccataaccaacattgttcaaaatatctaggtacatttgtagcaccattgtactttgcattaattgcccagctacactatactggaacaaaagatgagaaacagattcgttacaaatgcaaaagtagcaggtaggatcaccaagccacttctaatcatattagcattgtcaaagttgcattattcagtgttagctagagaaagatttttcttctagctggaattttcctttcaatattttcttatgaaatggactagtttcatttgaattcagaccatcgtaaacagatttgacactgaagtgtccctaacagccaaacctccatgctatctcatcgtcaccctcattggcacatttgcaacatctgctaggatttttcatcccaatctccattcatgcaccagccatcttgtgaatcttaatcatctgaggttagatttcatattatatacactttgcgggtgtttgtttgggattataatctgcccagattatataatccaacaaaatttgaattaagtgttggttcaaaatttgttgtgttatataatctgggcatattataatcccaaacaaacacacccttatacagttatatcttgtttacacgctttaagcagttcaagatgtaactgataaagaggtttgtcataaagaaagatatcgttccagaagagagcttttgtccattttaatggaaagtttcctcctttgcaagtttatatctttgacctccagtagatctgagtcatctggccaaatgggcgagtcagtttgcctatgtttcacagtgcaaaccggcccatccttgatgtcttggataccaagatcccctttttcaagctcttacagattttggtccatctgatcagacaatacttatttttttttattaacaccaccttgccaaaagaaagttctaattttatcaacggcattcacaattgtttttggtaactaatgctagtaggaagtggataattttgcaaacagaatttaacttcagcattagtagaagctttgatatataattctgcgattgcactagctgaggtatattgtagttttccatttttaggtttccaccgtttacgccttgttaacatgagaccgccagagatccttcaagcaaacatgcagaaactccacttgtttttttctctcaaagaaacacgatttgtttctagtatattcaagcattttctcaccggcccagcattgtgttttatgggtacattttattatttgggggcctgttaggtgtattagtacattttattacttgggcctgttttggttattgttctttatgtggaagtgttcttttttctgaggaaaatgatgacacgagtgataatcagttagacgcctgaagtgaacttatgagctgagtcttcaggcctaatcatgtccgatttgccaatttacttgccattttccatgttagggctagtttggtaactccatttttcaagggagggaaaatgatgtaatttccctttgagaaagccatagaatccctgctacacccatacacagactgtaggctatgtgagaacgattggggccaggtcttagacttgtgctttgttgtgggatagacgacgaaaattttttaatcctaaattaaaatttgctcagttgaatttagacatactgagcgccactcataccacagaacccactcatatagaggccctctcgctccatgttatggtatcaggaagctcttttaggtcattgtcctcatgttctaccctttctctacagatgctatgcacgactgcaccctagggctgtcaactgccgcaagaagaagtgtggtcacagcaaccaggttagtgttattgcattggaaagtatcgcgcctgtatgtatgtaggctagcatctttgtttgtcctgccatttgtaaagcattgaagcccaacaaagttaacgagctgtctcttgcttttctccttgcagctgagggccaagaagaagatcaagaactgaggtgctgctcctagtcagtttcatggacaatgttgggctgtattgctgtgtggttgttgaaccgtgtttgtttacccaacatttgggccttctgttatgttttaccttgttgtcgatgacacaatactatatgacaatagcaactctgttattgtagttttggtcactgttcacctgatatgtgccatatttcggtaagtatcgttagtgggcaaccggaactgtgtcctttctacttattccattttaaattattgaacttttattta

SEQ ID NO: 263 - DNA, 6222 bp, Zea mays
  source 1..6222: mol_type = genomic DNA
atgggcgaagggcacaaagcaaaacgaactacccgatttcaacggcccatatcactccaccaaaccctaaaaccgcttccgcaaccacgtataaaaacaccgcacgcgccgccgccgccgtcctattcctcggagaggagaagccgccgtcgcagcaatcacagcagcccggagaacggccaggtccgacaagatgcagatctttgtgaagacgctgacagggaagaccatcaccctcgaggtcgagagcagcgacaccatcgacaatgtcaaggccaagatccaggacaaggaaggtacgcgagcgcgccagcccatcttttggtagcaatagtattactagcatgtagcgcaggcgctaagaggctgtgtttgttccattccatagggatcccgccggaccagcagcggctgatctttgccgggaagcagctggaggatggccgcacccttgcggactataacatccaaaaggagtctacgctccacctcgtgctcaggctccgcggtggcatcattgagccctcgctgcaggcgctcgctcgcaagtacaaccaggacaagatgatctgccgcaagtaagttaccacctacgccttcgccttcgcctttttaacacttctgtgaccccgaatggaaaagtttgctaatattattgttcgaaaacgttatatcgaattatagcgacgagggttatttcacttatttgtagtaactttgcatcgaatgtggaattgataaccacacgtgcatttacttctgcaggaaccaatgtaggaaagatattttttttcgaactgataggattccacaattgcattacgaaattaacgtcagagaccagctagctacccttgccaccacaagacacctgaatcctaagaatcacaagagatagtagcaacgcaacagaaggtctaaaccatcataagtctttccaaaaacagtacaactgctagaacttgcgagacaaccaccagatcgcaaaacgactgagggcttttaaatgtccatgtatccacttagatccttgtgggttggattggtgtggtttggattttaacctaaacactccaacccatgtggattgaggtgaatacgtgtgcatccaaacaaggcctaaaagaacaatagtatcagcccagaactgtcagttcttctgattatatccatcgttgtcctgcagcaactgttgtccgtttctttctaaggagcctcaccacaatctttagcgttgtgttgacgccttcaaaagccatcttgtcacaacaagtcggtaggctagagttaaatccaatagaaaccatctgtcaaggttcagccatatggatagctgtcatgggcatcatagggagcgagaggcaacatccaggctgggataaggctagagaataagattgagatgagctgggataaggctagagaataagattaagatgagagaattgtggagagttggttagcagcagataagatcattatcaaaccaatctctctctctcaagcgcctaggcctgctaccctagaaccaagcctgcggcagaggggtataacctcgccggagaagacagctatcccatggaccgaaggtccatgacacctggtatcagctccaggttatcctcaccaccaccagccgcccatccctcaccaccaccagccgccgcaacgccctcccacccgccctctccaactccagatgcattcactcggctcgaagagagttttggccgtctcgcagagaagtgggatcagttcgttgtgatgttccaccgctacaaggagaagacagagaaggaactccaagcagcggtgcggcttcaggcggcagcgcgagggttcctggcacgccgccaggtacagtcccttcgtggggagaagcaccttgctgtggcctccagggccatcccatggccgtcatcacatgagcaggctgtggtgcgcttgcaagccgcagtgcgcggcttccttgttaggcgggcggtgcggaagctgcacttgctgatcagctcatcgctgcaccaactcgcagcctgctcgcccaaccaccaggtctcgtctatactttttgaaccccctgcagaagtcgagatctgggtatgcagcccccctgcacggccaaagagggtcatctccttcattcgggcaactaccttggtgctggacagacccaacataagaacgggctggttcctccttcacctttcatccaacgtaaagtccgcagttcagctctttccttgggatccaggaggacatagctgcagttcaaatttatattttagttccacaattattttgtattttcgtcttaaataataaaggtaagccgagatgtaaaaggcttaaccttaagtcgtgtcaggtaagtctatggcagctcaaggacgagctggtcctcaagggagggggagatgtcatgggcatcatagggagcgagaggcaacatcgaggctgggataaggctagagaataagattgagatgagctgggataaggctagagaataagattgagatgagagaattgtggagagttggttagcagcagataagtccaagaaagtaggggttagttgagagtttgtaggagaagttggttagccatagggctatttataagccgcatgacagcagggaataaatcaagcaagatcattatcaaaccaatctctctctctcaagcgcctagggctgctaccctagaaccaagcctgcggcagaggggtataacttcgccggagaagacagctatccccatggaccgaaggtccatgacaatagcatttttccatatactcttattcaagactaaatctttgggtatatttcaccctttccttttagccttcccatgcatctctcattacaccttagtgccttgggatcttttcccatgaacgcacatgcatataaaaaaggaacatattaggtgcacatagaactttggtgcatatattaaatcatgatcatgaccatccattttagatccaacgtcctctcacaccctccctttgtgcacagctcagggtagaagtggtggagggtgtttttgcaaaaaatacagggcagcgagatggctgttggatccagaatgaattgtcgcaatttaatatatgtaccatgtacaccaaaggtgacacaggtacactttttatgttccctgtaaaaaatagtagcagggtcttgtactgttgtacatatttgtcttcaaagcttagtttgttttgagtttttcatactgtccagcaaatagcagcaatccctacagcatggaacttatttttccagatgggagccatttttgaacccataaccaacattgttcaaaagatctaggtgcatttgtagcaccattgcagtttgcattaattgcccagctacactacactggaacaaaagatgagaaagagattcattacaaatgtaaaagtagcaggtagggtcaccaagccacttctaatcatattagcattgtcaaaattccattattcagcgttagctagagatatttttcttttagctggaattttcctttcgatattttcttatgaaatggacttgtttcatttgaattcagcacatcgtaaactgatttgacacttaagtgtccctaacagccaaacctccatgctatctcatcatcaccctccccattggcacatttgcaacatctgctaggatttttcatctcaatctccattcatccaccagccatcttgtgaatcttaatcatatgagggttagatttcatattatatacacttagggggtgtttgttagggattataatcataatccctaacaaacaccccttatacagttatatcttgttaacatgctttaagcagttcaagatgcaactgataaagaggtttgtcataaagaaagatatcgttccagaagagagcttttgtccattttaatggaaagtttcctcctttgcaagtatatatctttgacctccagtagatctgagtcatctgaccaaatgggtgggtcagtttgcctatgtttctcagtgtaaatcgtcccatccttatgtctttgataccaagacctcctttttctagctcttacagattttggaccatctgatcatcagacaatacttattttttattaacaccacctttccaaaagaaagttgttctaattttctcaatggtattcacaattgtttttggtaactaatgctagtaggaagtggataattttgcaaacagaatttaacttcagcattagcagaagcttgatatgtaattctgcgattgcactagctgaggtatattgtagttttccatttttaggtttccactgtgcacgcgttgttaacatgagaccaccaaagatccttcaagtaaacatgcagaaactccactcgtttttctctctcaaagaaacacgatttgtttctagtgtattaaagcattttgtcaccggaccagcattgcttcatttctaacactggagaaatcattgaacagcctgattgttttgttttctcatctttgtttttgttgccatcttacctttgggataaccaattacgggcttgatgatgacttcttgctttaaccacactgaaactgaagactggaggaggtgtatttctctctcttcctttgctgctcctctctctcggcggcaccttgtgaaatctctttcttttggtgaagaactaagtctatctccagcagccttactagtgcaaaacgtcatatgcacgatctgctggccacaccctaatgtcgaaattattctttccttagcactgctcttcaccaaaagaattagatggaaggatttggcgagactgaagagcactgttggaagggagtgagaaagatcacatctgatggatcttctcatgtggaaaaactttggcctttgtactgagagcaccaaagtaattttgatccttgctttgctgtaacatttattagtattgccattttgttgtttgactttactgtgcactttaccctggacctggttctttttgttcatttgcatggagttaatactctgacttgccagtttatgttcctgactattgtacaaatccgattccctgcccgcttgccattttacatgcaaccaaagctaagccacagctggtctgttgcattatgtgaggtgattttgctcattcacattttgtgttttatgggtacattttattacttgggcctgttattttattacttgggcctgttttggttattggtctttatgtggaagtgttcttttttctgaggaaaatgatgacacgagtgaatagtgataatcaattagacgccggaagtgaacttatgagctgagtcttcaggcctaatcatgtctgatttgccaatttacttgccattttccatgttagtgctagtttgacaactccattttcctaagtgagggaaaatgagctaatttccctttgagaaagccatagaacccctgcttcacccatacagtaggctaaaccctaaaccctaaaaccctaggcccaatttttagacctgtgctttgtcgtgggattgatgaggggattttttaatcctaaattaaaatttgctgagtcgaatttagacataaggagcgctactcatatcacataatcaactcagttagagtccctttctactcatattacataaccatctcagttagagtcccttatggtatcaggaagctctttttggtcattgtcctcatgttctaccctttctctacagatgctatgcacggctgcaccctagggctgtcaactgccgcaagaagaagtgtggtcacagcaaccaggttagtgttattgcattggaaagtatcgcgcttgtatgtatgtaggctagcatctttctttgtcctgccatttgtaaagcattgaagcccaacaaagttaacgaactgtatcttgcttttctccttgcagctgagggccaagaagaagatcaagaactgaggtgttgctgctagtcagtttcatggacaatgttgtttggttgttgaaccgtgtttgtttacgaactgtatttttgtttggttgttgaaccgtgtttgtttaccgaacatattggccttatgttatgttttaccatgttgtcgatgacacaatactatatgacgatagcaactatgctattgtagttttggtcattgttcacctgatatgtgccatatttcggtacaatttcgttagtgggcatcccgaactgtttcctttcta

SEQ ID NO: 264 - DNA, 199 bp, Oryza sativa
  source 1..199: mol_type = genomic DNA
gtaactgtgtggggtaaaattcctctctagtcttcgctttcgccatatcgcattttcgagaatacctaatgccgtagtaagccatacgggggtcgttttattgcttttatgcttaagtcacacacttcgagcaagtctattgaatctatactcgggtagaagtaatgcgcgctcatctccaacgcctattttgcaaaag

SEQ ID NO: 265 - DNA, 580 bp, Oryza sativa
  source 1..580: mol_type = genomic DNA
gtaattacgacgggattttgctatcgttttggttgccggacctgggattgtgtggggttttggatctggttcgtggttttgcggtggatttggttggggtcgtggtggatttgagggattttttgttttgaggtttcgtttgctcgttctgtgagtattctttttgggcgaggttgcggatttgtgaggtgtttttaggttctcacagcaggagttcgggctttctttatgttagatctgtttttttggtagatttttagttgttttgcagtccactcggcttatttcggaaggttttatctgtgacattttgggatttgcttctcggatttgctctcatcgaacgtgctttcactgagaacatatactagattcgtttcggttcccgttttgctgcctttttgttcaaattttgagcttggatctgtgtcctgttttgaactttttgctctcaaaataccgggggatttgagcttttcaaaagcagatctggtcctccttccatttcaaaccaatcccccatcgttttctcgcacctaaccgcggaatctccttcgatttgcctccctcccacccgcag

SEQ ID NO: 266 - DNA, 2998 bp, Oryza sativa
  source 1..2998: mol_type = genomic DNA
agcggcgaccggcgaggactccggcggcgacgtgggtgggactgagaagcgccgccgctgacaccagcgagacgaggcggcgacctccgttgacggtaacctacctaccaacctcgccattcctctccaaactgttgtgctgctgtctagatctcccacactacactagttactcctcgtagatctcggctacctggctcaagatccggggtcagatccgggtccggggattttctttgtgccctatggctgtattttggcgtctgtggctgatgacagcgtgtgttctcgagtgcggatgcaatctgagttatataggcaaatggccttgtcaactcgggcagcggcattgctttgctcagtgtgtttgaatgtgctgaaattcatgtagtaggctgtaggctgtgcatttcttgatttgcgtcttgcataattcactggtggattttctaaacctaacaagtttaaaattagaccattcaaccaaagacaggaggaataagtgaagctgttgtagtcacagcttatggccgatccaaaatttgttaggaatgtgaatatgtgatgctacaaacatatccttgtaagctaccatgctatttatcatgttccatcatggtgattggtgagcactcatgaaaaattcagatccaaacctagtgttacatgtggatttgtgctctgcaatctatcgccagtaataaaatggttgagtgatccagctactacaaaatcacattgcatactttttttttttgtagattatgcatcctggttttgggtggtgggttcctgatgtcaggaatataaatttagcctgctgatttaggtagcactgccggtgcacactttggtttttgaatacttgtagtcttccagcttcttgtagaactggtacaatgtgggccgtatataagaagggctgtcaactagcacatgctcactaattagtctaaacatttatgtttttattcattcaggtcaggtgcaatcatagaagtagttaatgacaatactttagttgttctaatattatttatgtatggactcaaattaacatgcaaaacatatgagattagtggcatgcattctttttcttaatagtggaaaatacgagataatgataactgtgaagctctgttagtactcttcattactctatttgagtggcagcatatctcatgctagccataaagcaagttctagacgtattctgttgttaattacttgtagctatataacccaacctagtcattccagcttatgtctcttagagatcatgtttattagcacctcaagatttcctctgcacagtatagtaactatcgaaaaagatattatttctttgtttttaattgacaaccttcacgtgctacttatttttgcagagtaaatctataggaaatggctgacggtgaggatatccagcctcttgtctgtgacaatggcactggaatggtcaaggtcaggaacttcatcttttaaaccatctatcatctccaagactccaactgcatttttaccaatttgaattccttaaaattttgcaggctgggtttgctggagatgatgcaccaagggctgtttttcctagcattgttggtcgtcctcgccacactggtgtcatggtagggatggggcagaaggatgcatatgttggtgacgaagcacagtccaagagaggtattctcacgttgaagtacccaattgagcatggtattgtaagcaactgggatgacatggagaagatctggcatcacactttctataatgagcttcgtgttgcacctgaggagcaccctgtgttgctcactgaagctcccttgaaccccaaagccaacagggagaaaatgacacagattatgtttgagacgttcaatgttcctgccatgtatgttgcaatccaagcagtgctttcactctatgctagtggccgaacaacaggtatgtgatgttttacttaacttctttctttccaatttcttggttcttttgcatctatagattcatttagatgagagctcggatgattaagaactattcttatacatttttaatgttggtcagtaggtgttagaattatattatctatgctcaataatagtcgtgcaattatttaatgttggtcagtgcatatggctaatgctgttttaatcaacaggtattgttctggactcgggtgatggtgtgagccatactgttcccatctatgaaggatatgcacttcctcatgcaatccttcgtctggatcttgctggccgtgacctcacggattctcttatgaagatcctcactgaaaggggttactcgttcacaacctctgccgagcgggaaattgtgagggacatcaaggaaaagcttgcatatgttgcacttgattatgagcaagagctggaaactgccaagaacagctcttcaattgagaagagctatgagctgcctgatggccaggtgattaccattggctcagagaggtttaggtgccctgaggtcctcttccaaccatccatgattggtatggagtccgctggaatccatgaaacaacctacaattccatcatgaagtgcgacgtagatatcaggaaggacctgtatggcaacgtagtgctgagtggaggcacaacaatgttccctggcatcgccgaccgtatgagcaaggagatcactgcccttgctccaagcagcatgaagatcaaggttgtcgctccacctgaacgcaagtacagtgtctggataggagggtctatcctggcttctctcagcaccttccagcaggtaagtccttatcattacagcttcttagatgctcaccagaattagttcataactacttcataaccaatccattttgtttatttgtccacaccaagttgtattttaatggttttgctaatgcacatgtgatttgtttgcttggcattgataaaaacagatgtggatatcgaaggatgagtatgatgaatctggcccagcaattgttcacaggaagtgcttctga

SEQ ID NO: 267 - DNA, 821 bp, Oryza sativa
  source 1..821: mol_type = genomic DNA
gtattttgctagatctgctcgttttgtttggaatggtgggagattgggtgttgctttgctgcattccgcgtgtagatcttgtgttccatgcttgtcgtagcgcgaatggtgggggaatgctgcgattctagggttcttagctcgtagatctggccatttttttttactgaacatgtagatctgtgtgtttcactgcgcaatccattcgtggtgtagttggggaggagatgttccaactgctgagatgtggtgattagcacagtaggtgtggtggttgtcaacaaccttgttaagcctttcctcgtgtagtacttaagatgtggtagatccggcacaatttcatttatcattgtatgcttgattggttggtttgttgccttgcttagctgcaaatgtggaactctacattcccctgacttgtagtaaactgtaatttttcgcgagttgttgaaggcattttaattcgaactgacacttttacacttgcaagtgtaactgcaagctactaaaatggtagtagaatctaggggctgtaattcaagttttacctttgagcccagcttatcttaaggttgtttctggtgcaatactctgatatttgctagaatgatagatgcagttaggaaaataatgcagcatattgttgtttagttctactgaataggtatgctatgtggtttctgtcacattcacacatcagtagttcacttggtggtgccttaagtgaagcgcttatgattcacgctgatgtgttgcagtttgtgttcaacatcaactgaatattgggtaggaattaatgtatgtgctccatttgccacagg

SEQ ID NO: 268 - DNA, 396 bp, Oryza sativa
  source 1..396: mol_type = genomic DNA
gtaagtgaaaacatgccataattatggtactgtgctcagttatcgtactctgctctatgttgttattgatcattgatttcatcctggtacatcagagcagtttataatcagtcacctttatgtcagatgccactaccaatttactcttttgtgaagtacggagtataatgaattagctggtccatgttccccattgttgtgtgtttcatgcatcctggcactacttgattcaattaatgagtatgtctggaacttgcattcgaatacactgatactgaatatatagatgataagtctgtactacatgtatggggtctacagtgttgatatgaatatgggtttcttcatgctgttttacctaattctgactctgctttgtttctttccttttgcagt

SEQ ID NO: 269 - DNA, 102 bp, Oryza sativa
  source 1..102: mol_type = genomic DNA
gtaagcctccctctctctctctctttccagatctgcgcgcggagagcgtgcgccgcggcgaatctgaggcgggtgatgagaatgggtggcgcgcgcgcgcag

SEQ ID NO: 270 - DNA, 77 bp, Oryza sativa
  source 1..77: mol_type = genomic DNA
gtaactagtaccctaactatctcagatctgcctctcctcaaatcaaatctgagttcaaatgctgctgctgctgcagg

SEQ ID NO: 271 - DNA, 437 bp, Oryza sativa
  source 1..437: mol_type = genomic DNA
ggttcttctcgatcccaattcttgctcgtctgcatctcttgctgtcttttcctacttaattttgtgaaattctgatattcggatgatggttttgtcctgtttggttggttcttgctgtagcctaaaaaagaattgatcttgaggagaattttggggcagagtctccagctccagtcatgtatgacaatcagaagtgaaattagcgatttttattcgatgtttgatttgcaccatgcatgctagcactgttcttgtagagatgctatctgtgaatctgtgatccccaagccggttgctttgagagtagaaagcctgtgccttttttgtgaagcgaatttcatttcaagaagaatactagtctgtgacttgctgcggtgcctagtggctcctagtttacgatatcctaatccttggtcatatctgacgcttgcttgcag

SEQ ID NO: 272 - DNA, 444 bp, Oryza sativa
  source 1..444: mol_type = genomic DNA
ggtgtgatgcttaccctgaaactgagccattttgcagaaataaaatgtgtctatgaaaatgtctaaaccaacatattgatatactccaactagaatagtattcacaagaaacattctacaggtatgattgatccacaaagatatggtttgggtggatttagaggagtctgaatccatgatattgcttacatatccttgggatccataaggattattgctcacataaggaataacattaattgtttataacttatatccttggggtgacttgtaataataatttaggaacttacgacatgccgactattttttagtgaaaaatatgacgccataaatttagcttcctccataaataaattgtcatactagagaaactgtcatattcctttataatgaaaatatttttttagtaatgattcaaatccttttttttttctgctgcag

SEQ ID NO: 273 - DNA, 1082 bp, Oryza sativa
  source 1..1082: mol_type = genomic DNA
ggtaatcaagaaaagtattcatgatttgttaccatgtttgtgttcattacagcgtattgtagtgccatggaaaaaaatagaatactccagcaaaagaatgtcttctgtgatgttgaatcatttatttgacaagtgcatggataaaattctcagggaaaaccgaagtaaattatgttcatcagcaaatgcaatttcttataaaactgattctcccatgatcctaaacacatgtccaattttcagcatatttttcattccatcattatctcttttttttcgaaaggccattccataagtatctgaaaatgaccacagtaactactgtaaacatctgattcttatgattaaaaaaaatctacatatgtctgccggaccctattttgaatagaaagacccttccaaacaatctaatctttatggaagacttaatctaaaaaaatctttatggaagagctgtgcaaaattacgtaatcaccaactgttcatatgtccttatccaaaggcgtagaatgtaggcaggtgtaccttcacactttttgtgggagcaacatcaacctgttattgatggaaacaactgtttttctttttatactacttcctccgttttacaatgtaagtcattctagcatttcccacattcatattgatgttaatgaatctagatatctatctagattcattaacatcaatatgaatgtgggaaatgctagaatgacttacattgtgaaacggagggagtatgaactatttccttgataatttttacagaggtcagtataggtctataagagtcagatataggacaatacatcatctacataatcgagagcgagtgaaaaaaaaagttatttttagttttcttttttcagaaggctgtgaaccatactttaatttaactatgtaagactattaataatcgtactagtatttttttatgtcatcatcatgcatgcacatcatgtcagatactcagatatctcaatgcaaggtaaacatgtaccctccgaatggactagagaagctaaatttgtcgatgttaacatacaagctctgtactgaaaaccactccctgtgtgttgcag

SEQ ID NO: 274 - DNA, 93 bp, Oryza sativa
  source 1..93: mol_type = genomic DNA
ggtacgttaactccatcatctcgctgaattccagagattttagccggagatgatgacgatgatgatgacgaagacggtgatcttgtgtttcag

SEQ ID NO: 275 - DNA, 2090 bp, Oryza sativa
  source 1..2090: mol_type = genomic DNA
gtaacgtacacgtcgattttatatatacatatcctcttgttctttaaattcactgtgtttcgttaaaaaaagaaaaaacgaatccttgcgttcatggcattcctctgcattttctctgcatacgtgtttctcgggcctctgtaaaccgtcgctgaaaatttagaataggatcatatgattctttaactttttttttggcaagatcattttagacggtggcatcctaaaagtggacaaggtttgtactttctgtgtgtatttttaggtaagacagtattatgctacacattattagcctatcaccgcagcgtgttaagatccgcatgaaaagaatctggagttttttttttcttttgttagacaacagagtaatacgccaacttggcagcattgataatgagcaatctggtatgaattgcttgtgggtctcagaaaaaaaataaaataaaaatgaattggtggttccagttatgagagtgtgaattgttcaatttgaggagcaaaacaaaccagtagtgctgcaaatttcaaggatgaatttcagtgtgcaaacttatcataccattttaggttggatttgaataggaataccagcagcaccagttgttgaacccaaatttggacatacatggaaaagaccatacatgatacatagtagtactggttggatcgggttaatcagacagaagcacaacatctttactcgtggttgaaattgggaatatcttcaaaaaaaaaatcgaataagatgaaattattattttcagtccccatcacattacaccacttccacctgtcggaatgagacattcatcctgtgtcaagttgatccattggcatgatgggaaatcgggatcaacacaggctagaaattgaggcgccatatattgttggtttaaatttcagtagttctctgtgttagatctgtaaatcttatatcgagttgaatcaactgcttaaaaattggaacactatggatacatgttatgaaggttctaaaaacttcaagtgcacaaaaaattcacagaatacttgaggtacagagtactgcttatgtgcgctgaatactatttttccctctatgcataaaaggtgaatctgactattatgcattcattcattgccaagatgtaagatatgcatgttaaaaatgttacccagtaatcagtaattatcattgttttcttgaaaatgcgaggtacaacgtatgcccaaacgaattgaacccagcaacaaactaaaaaaaaaaatcccctaactgctactttctggcgaatagaattgtcgttgagagagagttttcatcagttcctcaggtggcaaacaactggtattgtcggtcagatgcgagttttcggtacagaaatacatcaccatcgcatctcaccatcttcttttgccggtgaaggttcatgaggttatcatcatcacaataataatgtactactagtagtagaaaaacaatcatactgtgactagtgacaatgttgtacgacctaacacaagaaagagtgaaggaggaggaggatgtatcagctaatggaacagagccgtcggtggtggttacagcggatgagacactcagacaggctgttgccagtctctggtggttgggttacatgatagatcgatggatggattatattagtgatgatgttctgattacttgcatatgtacttagcatgattgcctttggacgtatttgggagatggattttagtgcacgtaatcatcagaaacagaatataaacacattttcggattcaacttacatattattagaaacacaaattagtactacaggaatatgattagtccggagatctgataggacagataatgcggtgctagtttcttgaattgtttgcactttcatgactcttaacaggggcatctgaactttagctcggttaaatgtctaaacctcaatgtacagtagagttcagatcattttcattttcagttaagatgtctcatatacttatcctaatctgagtaatgtcctataactactgatggatagttggtttgttttgatacggagggagtatgtagtaacgtgagtgacatgcaattttgtgagtgcagg

SEQ ID NO: 276 - DNA, 93 bp, Oryza sativa
  source 1..93: mol_type = genomic DNA
gtaagcgaagcgatcatgcaccttgaccttgtgtgtgtaatttgcttgaaattaacatgatggaaataatgatcaatttgctgttgttgtagt

SEQ ID NO: 277 - DNA, 84 bp, Oryza sativa
  source 1..84: mol_type = genomic DNA
gtaagctgtttggatctcagggtggtttccgtttaccgaaatgctgcatttcttggtagcaaaactgaggtggtttgtgtcagg

SEQ ID NO: 278 - DNA, 250 bp, Oryza sativa
  source 1..250: mol_type = genomic DNA
gtgagcacattcgacactgaactaaaaggctgtgaggatgaattttaattttgacattcacatgtagatgagatttagttctgcaatcttcaattgtcatacagcaagactatataatagctttcaaaataaaatcataggcagttctcataaatggaatcatgtttgaacatcctaattctgttggcatggagtgctttgacattttgatgtgctacagttgtgaataactgaatttccttttcccagg

SEQ ID NO: 279 - DNA, 82 bp, Oryza sativa
  source 1..82: mol_type = genomic DNA
gtaaatatacaaatgcagcaatgtagtgtgtttacctcatgaacttgatcaatttgcttacaatgttgcttgccgttgcaga

SEQ ID NO: 280 - DNA, 946 bp, Oryza sativa
  source 1..946: mol_type = genomic DNA
gtacggatccgcgtcccatctccctcaccccccgtgttcttcgtgcctgcttctgggtcagatctgggtggattcgcggttgttggatgtggggggctgtgtttatttgtcggtggatctggttgtctggatctgcgttttctctgtcgtagttagcggatctgatgaaatgtttagtgttcgtgtatactggtatggtggatctggtcctaggatgcgtggaatggatatatgtaggcgaattggaggatttattttgtgaattttgctgaaatgatagttctaaacactggatctgacctcgggatgctgttaaatgtggaaatcatggtcgatgctgtcatgaacatggtgttcttatggtagatctgagcaatgtatgtttcaaaattgtttgtcacatggaaatgctatggttctagatgcaatagaatgatacatgccgagatcccctctagttgatatgatagatcatgatgttttacagctatgtcatatgaatatgttcatttgttaccgatgtatttggatctacttaacatttccaaagcacgccgcgttctaattctagatctggtagtcatgtttgtacacgtcacccacctaatacaaatacatatgtctagtgtttggtgacactgcccgtcagatctgttttttccagatctgtggaacaaatactccacgcatgtatggtagttttgaaacgatcttgtatcttccattgttgtagtaacaactaaataaagtacaattgttcaattattgggaatcgtattttctgtagtgccgatgtacagcatattcatagatgtctatttaggaactcaaattttaaattgaggactagttatttattgtgggtcagtcttttgaattgtgttatcttgctgtactgaaataataatgtaccactaaggcgctaacatgtattttgtcctttcag

SEQ ID NO: 281 - DNA, 2538 bp, Oryza sativa
  source 1..2538: mol_type = genomic DNA
atgagggagatcctccacatccagggcgggcagtgcgggaaccagatcggggccaagttctgggaggtgatctgcgacgagcatggcgtggacgcgacggggcggtacgcgggggactccgacctgcagctggagcggatcaacgtctactacaacgaggcgagcggcgggaggtacgtgccccgcgccgtgctcatggacctcgagcccgggaccatggactccgtgcgctccggccccttcggccagatcttccgccccgacaacttcgtcttcgggcagtccggcgccggaaacaactgggccaaggggcactacaccgagggcgccgagctcatcgactccgtcctcgacgtcgtccgcaaggaggccgagaactgcgactgcttacaaggtatctcatctcatctcgcatgtcccattccgcgtggtttagctagatccgagagaggctttgcaccatcgagttagatctagtacggatctgagcttgtagcgggtggaagcgcgattaacgtctttttttgaaaccatggagtgcgattaacatcggtgccagtttcgcatttaagggagaagcggttttagcatttagacattccccaattcgtagtcctgttaattgtagtggtgtatgtatcgaattgaactgtccattgctgttgatcttctctataagtatgtcttcgtgttatttgttgtatagcatgataatctgtcatctgtgctacttgtgttctaaattctaatggcccaatttgcatttagcttataatgccattgtgtgaccaatttttcatatcttggtagggatgtgcctgtgagaattttaagctccataagacgctctatcaatcatcaacctatgttttgtatatgagctcctattgtcttatgtagcttgatcaacatcaattgttgttgccttgttggtggaatgggcatcaacatcaacaccaatatcttatctagctcctactgtagctgttctagatgtttacacagaacttttctctttacctgtagtgtccacctgtgtcatagctggatttaattctttaaaaactcaaaacatagcaaaattgtaaccttgtctttcatggtttacaatgaaatcaaaactttattgctttggtcatccttatgattatttatttttggtacagctgtacaggtataatattcaacatgatagacccaagtaatatgccttagttgaatgccatgacaagttcatcgactaataaagcttggtagaagaagatgtgaaaaattgcctttgccttaatccatataataccttctctattggaacatgatcaattgctcccaaactctggtttcgtggaagacacagtgataccctaaacttctagctgcccttggccttttgaatgttgctacattcgttgaacccaaggctgccttttgtagatgcatgtttgaagtctgtttgcattgatgactaacatcatggtcttatattctttacttgcaggattccaagtttgccattcattgggaggaggcactggatctggcatgggaacccttcttatttctaagattagggaggagtacccggatagaatgatgttgacattttccgtcttcccatcaccaaaggtctcggatactgttgtggagccttacaatgctaccctttctgttcaccaacttgttgagaatgctgatgaatgtatggtgcttgacaatgaagctctctacgacatatgcttccgcacactaaagcttgctacccctacctgtaagttagtctcctcttgtttacttctccatgatatcactaaattactgttcaactagaagtaggcactcatagcttgcttggttctaacaatgcagttggtgacctcaatcatcttatctctgcaaccatgagtggtgttacatgctgcttgaggttccctggtcagctcaactctgatctgcgcaaacttgctgtgaatctcatccctttcccccgtctccacttcttcatggttggctttgcgccattgacttcacgcggatcacagcagtaccgtgctctcaccgttcctgagctgacacagcaaatgtgggatgcgaagaacatgatgtgcgctgctgatccccgccatggccgctacctcacagcttctgccatgttccgtgggaagatgagcaccaaggaggtggacgagcagatgctcaatgttcagaacaagaactcctcatactttgtcgagtggattcccaacaacgtcaaatccagtgtctgtgacattccgcccagggggctgaagatggcggcgaccttcgtcgggaactccacctccatccaagagatgttccgccgggtcagcgagcagttcactgccatgttcaggaggaaggctttcttgcactggtacacaggcgagggaatggacgagatggagttcaccgaggcagagagcaacatgaacgatctcgtcgcggagtaccagcagtaccaggacgccacagccgatgaagagtacgaagacgaagaggaagaagctgaggccgaatagc

SEQ ID NO: 282 - DNA, 100 bp, Oryza sativa
  source 1..100: mol_type = genomic DNA
gtgagcggccagatctcccgctcctcttgagattccgttggttatttgagaattatctgaggttttttgggtttggtttggttttggttggttggttagg

SEQ ID NO: 283 - DNA, 942 bp, Oryza sativa
  source 1..942: mol_type = genomic DNA
gtgataggcttcgtggttcatttgaacgtgttcattgttctacgctgtaaacctgttgatttggctgataactggtccaaattgatactcactcattactttacatgccgaaatgttaagctccgaatttttagggtcatttggtatgtctatgaggtgcccatagcgagtttaaacactttgcgtctaacttgctagctatagtctctaggctaactgccattatatggtcggattttgtcctaaatttatgtttcagtcaaactcttgtgctattttttggttatttgttgaatagctcaattgtaaagaaaattctagttttggaccaaatcggtatatgctctgcgttataaagtttaaatctaactcgattttaacgtgctatgtgcattataaaatatttaaaatttaaacatgtaatatttaaacatgtcctattgaccattgttcatgcttctgctcaagcaatgtttgttagctaagctgcagttgttcctgcatatcatttcaaaattacgatttactgatagatatgctacctgaatatcttgcattccttctagtgaatattttccagacattgatattgcacgaacgggaatgggtcctttgctccttttactagcatatttagacatttcatgattgtgtgtgattgcagtgctgtatcttgtgttgctctatgtaatcttgatggttgcatgaatccatagaccaaataaatgtcagtagtttcgaaaagccaagctgtgctaaagggaccctaagtatgcttcgccgttttgaacttcaattcaaattctttgttactactttacgaagattgtttcatttgacttcgctcattatttttattgtgaatgcgttgatttaactattattctgttgtttcaaattttgacagcatgtttcctcatcttttgttatgctctctccagg

SEQ ID NO: 284 - DNA, 1368 bp, Oryza sativa
  source 1..1368: mol_type = genomic DNA
gtaatataaccctacttttgtttgagccaatatagtagtatgtttttccttttaaattttgtgcttatttttatttggctaaagatcatgctttgctctgcattttacttccttatgcatgaactcttgccatataagcaaaactaaatttctctgtgacccaaccttttgttttaggaaaaatgaattgaaaaaacaacatatgttgtttgttgttctgtttgtatgcttctctctctatatattgtgtatttgtgtgtgttgagaggatggaggggggggggcataattccatactgacagaaataaaaggtacaacagaatcaaattcacctaatgaatgcttctaagtacagagaagacaactttacaagtgtagcatatcttatgttccttgtgtaatgcttgcatcccttttgcttctttctacattactccctccattccactatacaaggctttggatgcaaaaaccaaggaagctcctataactgccacagaattagggggctttaaaacaaccaaagcaagccaacgaatagcgttcactgcatgcatgtgcatggatgagaattacatgattcaaagaggtgccgctgcagctgccttcaatgcatgcatgcgcatgaacgagaataacggagtcaaggaggtgccgctgcatctgccgccctatattctggaacttctgaaaaacacagttaagccttgtataatggaatggagggagtatttatctactttagagtaaagctgcacatatcgaaggcttgctgggaaaaaagaatgatttccttttgagctcaaaaaatgtgcaacaacaagtgccgcccagtgattaatgatgtttgtgcatacacagaacatcatacaagggtgacagaaatcttgtgtaattgaaatgcttaggttactcttcttccattattattgttctactcattaaggtagtatacttaccatgattttgtttcagatttttttaaaatattcatttttatcttgctattttctggcagactattttatcttactattatttttctggcacactaacttaatgggaataactgtggagtaactccaacctcttttgttgcaggcatagataaacatttattttatttgttaaaagattccatttaattaactagattctgtaacacatcagagcaggacacagcaatacaaagctggccccaacggatgtatataaataattcaattccatctgtaaactgtatttatgttgttcagcattggctgtgtggtgtgttttgataaacaccgtttagtttcataatggtggggaagcagcagtcgttttggagcttaacgttgtattgacatcctttctattttaacaga

SEQ ID NO: 285 - DNA, 222 bp, Oryza sativa
  source 1..222: mol_type = genomic DNA
gttggttattgacttgctctatattggtcttttctatgtataatatagggcccagtattgactttgtttctgttaactgtatgtgttatgtgcaatctgtctcttcatgaaatgcatgatagctgtatgtcttaatctgttttggttgatcacatatcttgttggctacttattgctatgaatctgtgcaaacctatatttctgaacacttcttcccccagg

SEQ ID NO: 286 - DNA, 749 bp, Oryza sativa
  source 1..749: mol_type = genomic DNA
gttagttaatgctactttacgctgtcggattcatcagtcttttacctcacaaataaaaggcatatacatcaactattatttgagcatttttagtcttgctattttgacattgataatatatatacatgtgaagagcattatcattcggtatgaaaatttgcattctgtatgagacttgtggagatgcaattatctgagccagtattgtaatgctattggtttatgatccatgtgagaattactattgtttgtttccttgctatgttccagagcaaagaaatgggaccactatggtagtttgtccatttgagaactcttgctgttggaccttgaacttttatttggagggagagaaactgggatcttttattatattaggaaacctcttgttctgttgttgtcattttgaattttgtcagctgtcaatattacactgaatatgtggtggaaaatttgtgtttggttagagtcaagagtcttacgatactgcagtctggtcacagcagtgcatataatcaatattttagtgaatacttgcttaaaatatgttttggtctgtatacgatttggtttggtggcactactgtagctttgcattcattagtgctttcttatgcttggttgcagattgatttaaatggcttttcatttcatgtcaccaaaaccatttgaaaccaattatttagttaagagccttataacttagtttcaatttcaaggtatataacctcatgctttcactttcaagg

SEQ ID NO: 287 - DNA, 84 bp, Oryza sativa
  source 1..84: mol_type = genomic DNA
gtaaccacctccctctcccttcatcccaattccccaggtccaactctgtttgaccttcattaaccaaacactcgttcctccagc

SEQ ID NO: 288 - DNA, 109 bp, Oryza sativa
  source 1..109: mol_type = genomic DNA
gtaggtgcgccctttactgttgctgtcaagtcttagtgctttcaccaccccgtgattggtacggttgtacgtgcgtgaccctaactcaaagccggatttgcctttcagg

SEQ ID NO: 289 - DNA, 85 bp, Oryza sativa
  source 1..85: mol_type = genomic DNA
agtacgtgcaaatttcacaacgacgacggcgagcattcttacgattttgttttgacgaaccgatcgatcgatcgatctatggcag

SEQ ID NO: 290 - DNA, 92 bp, Oryza sativa
  source 1..92: mol_type = genomic DNA
ggtgcgccgccattgctgcatccttccgaatcgcgaatgtcttcttctcggtgagctgttcttacctcgatcgtttgttttggcggtttcag

SEQ ID NO: 291 - DNA, 1489 bp, Oryza sativa
  source 1..1489: mol_type = genomic DNA
ggtgagcatcccatcctcttcctcattctctctctctacccacgcatcttctccaattttgcgttagccccttgtttctcttctagacatggaaagtttttctcttaattttgcttaatctaactaatagcagtttttttgttcgccaaaaaagtttttgggttgaactgaaacccccatgtcccattagatccgcccctgcgatatcgtctttgtgcggatctgccatttcgtcagtgttcttagcttttttggttgatctactgaacctcagatcggggatgagacactggttgtgaacactaccaatacgaatttgcggttttttaagctattttcagttaaacttctcttcttcagctttgcttatgttggttggatcgggggatcggccatgcaatatgtggaaggaaactggggaggtcccttcgttccaacttgcaagggtatccgtttggatcattgcgtccatagaaacagaattggatttggatcatctgtttggaggaaaagatctaactaggatttagtacagatttaaaacaaatcgcagccgaatcaatccattggaacattcatgatcatgaatgttagttcaagtgtgtcttcttcttctgtacatgttatgaaaatgaaaaaaaaaacgtaaatgggacttttccgttctgcatagagtctgtagtagtaaatgtttatttttatggtgtgctggtttgcatcgggcaggatggtttgtgttttactgcagagcttttcttttttcgttactgcaagaatctatgtgctatttgttagtcacaatatcttgtcagttatagcacaacctatatattgcatattacttcctaactactaagtttgtacatacaaaatgtcatgttcaggatttcgtgttgccactaggaactagaacgtgaatgccactacttgctggcacttcaactttaaacctccacatttgtatgtttgctggacagatcttgatatctaactactaggctggatgttcagaaactgcaataattgtgatctagtactgttgtggttttattcaactttggtaggcacactggcacagttgcacatgggtaagcatgtccctgcctgacaggacagcttattttctctttagtttcttgagtataaagggaccattaataccatttaagtgttatatgctttcatcttcaaacctgttattagtcattttgtaatgaaaatacatactatgactaaagctagactagaggagtagagctgagttgtgctaaatgcctaaatacaacagtgactttcatatatttgcttatgataaaactgtcttagtttttattggatagctgaatttatgtaaaacattgtaagctgttctttgtttttgtgctcatcaatcatagttctggcctgcaactagtctagcaagaaatatggtaaaaatttattctgtaacaagtaaatgatggagatggcttatgatttccttgttcag

SEQ ID NO: 292 - DNA, 90 bp, Oryza sativa
  source 1..90: mol_type = genomic DNA
ggtttgattcttataccattgtccattcgttttttttaattcatggaatgagttgttcaaaaataataataactctcactctctctctag

SEQ ID NO: 293 - DNA, 94 bp, Oryza sativa
  source 1..94: mol_type = genomic DNA
gcatgtgtccattttctactattcaaaatgagtctttgtacacttacatctcttcattggtgatatgaccccagtgcgttgtggcttgtgcagg

SEQ ID NO: 294 - DNA, 410 bp, Oryza sativa
  source 1..410: mol_type = genomic DNA
ggtacttgcatgcattctctttaattctgggggttcatggcatgttggtacttatctgcagcattcatttaattctggggagtcctggcatttgggcacctagcggtcatcctgaggaaatttattttatgttctcctttaacatcttccaactttgaagttttaagtgaacaactatgtagcaaatttcttttgtgattcctggtaaataggaaggcatcttatagtttggttatacacgatgtgatcaacatttatttatattccaaaactatgattagaagaaatgaaagaaaaagaaaaggtagtcatttgctatttgattatgccctaataaactagattacacattaattttgaatgcaaaatgttagataaagacacttatcctgttctttttcctgtcgcag

SEQ ID NO: 295 - DNA, 145 bp, Oryza sativa
  source 1..145: mol_type = genomic DNA
ggtaataaccgtagcattttctttggtctttcactagccattgagaaatgagggttgtattcttaagtcgtaatatgaatagcttttctttagctttctagatactgcttacgtaccaatatattgtcctccttgatgtatgcag

SEQ ID NO: 296 - DNA, 922 bp, Oryza sativa
  source 1..922: mol_type = genomic DNA
tgtatgccctaaattatactgtttgacctacacaaccaatcttagttactttggataatccgccttttatgttcattctatttaatagtttatcattactatgaaaattcattgtttgtgttcattgtattgtatcacattatatcatttgtttagagtatatcgctatggtcatgcaatctgtgtagacatcaataatttactaggaagaccaagctttagcattaagtttgttacgatattaagtttgcttctgcctttggtttatattgtttttgtttagtgttggttaacaagttttccttttttttttgtgtgtgtttctttctccaatttgttatgctaaatggtctggtccaatgctgctagccacaacgccatctatacttgttattctttgtttttacttttttagagctattatttgctcctatttcaaaaaatatgcgtttgtgcagtttctgtgtagcgatttagtctgatatcagtgtttgaaactgaaagtagacattaaaaacttctcagcgagtctagtctggttctgtttttctttcactgctgccagtaaccagtgaaaaatctgctgaaacatggattaggatattgagttggtatttgaaatatgaccagaaaccatctagataatttttcgcatctgggaattttgtttcttagtcaagtaatataggaaattcctgtacaatttgagatcgcctctgtttttctgtccctgcttttaaaggggttttgtagttagcactaatttgagattgtcttttcaattagttatttatgacatgattatttgatagcactgttgttggtctaatcagtatttacttatcatcttccttgcggcaaggcagtctgagttctttttaatacattacacatcagctttgctatcctttttcttttgtag

SEQ ID NO: 297 - DNA, 642 bp, Oryza sativa
  source 1..642: mol_type = genomic DNA
agtaagtggcttatacttatttgcattcattctaataagggcaacagatggcagaggtagtgtgtgctccagttaacatttccatctccagtgtatagcagattgaaattcaacatcttcagaacaaccaccaaaaaagaacaataaaaatataacaccagtagcattgaataatggtttctaatgtcacggtatagaattcctgttatgctttaggtgcaaatctctagaatgacaatgagtcggtgatttggctcgagtggtatatttgtgtagcttgtatcatatgagttactattagtcttgtctcctgtcagttttcggctcatccctttactttttccgtgactttcatgaatatgtaaacacaaacgcatatctgtagtcttattttctttatcatgagttgatcatccaacagcacaaaaataaattcaacataaaaatggatctggttgcttgtttagattctagttacatatcttgtactcacttgtttgaaaacagtgtaataaaatggacagagctatattatgttaaacaacaaaacaaaagagatcgtatatgagggattacatatatatttcaaaggacaattcgcacctgaaccatgatctcaacctacatttttctttttcacag

SEQ ID NO: 298 - DNA, 175 bp, Oryza sativa
  source 1..175: mol_type = genomic DNA
tgtaatccattactatttactcctctctttctcttatgtgcttattttttccttttttgggtttatcatcaaaaactagcacaggtagttgagctacagtccaagaacaatgctggtcttcatttcattatttcgtcttagttgatttatgtatgccttttttgtgattaaatag

SEQ ID NO: 299 - DNA, 81 bp, Oryza sativa
  source 1..81: mol_type = genomic DNA
ggtaatattttgattcatctcggtagtttgggtattgtgtgtttggatttgattactttacagtagtttttctgcctgcag

SEQ ID NO: 300 - DNA, 73 bp, Oryza sativa
  source 1..73: mol_type = genomic DNA
ggtagtgtctttactcttccttattattttgctccccttatcttgaaacttttctaacacctgctgaccacag

SEQ ID NO: 301 - DNA, 86 bp, Oryza sativa
  source 1..86: mol_type = genomic DNA
ggtaaagtaccaggcgtctttttagtcaatacttcaacactgttaattcaaagtaagttgagaggagtgcttatgtggcttttcag

SEQ ID NO: 302 - DNA, 75 bp, Oryza sativa
  source 1..75: mol_type = genomic DNA
ggtttgccactggagtcatttttcaaaagactataaatgtgctgctgtgtgtaacaattcatatgttttgttcag

SEQ ID NO: 303 - DNA, 257 bp, Oryza sativa
  source 1..257: mol_type = genomic DNA
ggtatgttctttcaaactaagaatgtgaacaagtttttaagtacaaatgcacactccaattcttgaaaataacttgcaagttctatgataggttcatttctgactaatatattctatgataggttcatttccatcacatggttgtcacagcatcttggtgtccaacgaggggccgctcgagagccatggtcaccaaagatgctgtgataaccatggcccatcatttctttgttattaatctcatctaatattgatag

SEQ ID NO: 304 - DNA, 845 bp, Oryza sativa
  source 1..845: mol_type = genomic DNA
ggtaagttacatctatcttcagtctggtgttctcctatttcttgtaagacaaactaatgaaatcattacatattacatgataatttatattttcagtacattttccttattgttcaaatgcatttcattttaagggaacttttggaatgaacatgatcatatgttaatctcactatttgattatgtacttcatttccccttcctatagtcatatgatgctttatttattattcacaaaagtagtaactggtaatgtagtatcaatctagtagaaatacaaatatatctagcacttaattggaaaggatgttacacattggcaaactcaaatggagtgtcaatgtccccttaggtgggaaatagacaaatcttaactacatacttgtgtgcatcatgagccaaagaataaatccactgaaagaatattcagttgataacctggtacaaatcctgaacaagtgtttttcaggtgttaaggtgacataccccttgtttttgtgccacgtatcttaacatacttttgcttgcttatataagcatattggtgaaatcattggtgaagtttgacagattatggtaattgaagaaatccaaagcaagaaagcaatttacttaacataaaataatgtcatctaattggaaacttcagaataatagatttaaagaggctcactaaataggtggatccatctttaaattatttaagtgctttatattttgccagtttatgccacatgttcttaatgtaaaaagcatgcaaatgtgtgcagtgttgttttgctcctttttattttccccctttttgcgctcttatatttcaaattcataagccctaacttgtacag

SEQ ID NO: 305 - DNA, 121 bp, Oryza sativa
  source 1..121: mol_type = genomic DNA
ggtaggctccccatggcttctctcccctctcaatcgcggccaaaattccactgggttttctgctacttttgagccataaatccccgagaaaccctaactaacaagtgattttccatcgcag

SEQ ID NO: 306 - DNA, 834 bp, Oryza sativa
  source 1..834: mol_type = genomic DNA
ggtatctctccaccctggtgagcgccatgtacttgtccctgtcgtcatttccatgctcagagcctcagttatgttatttcttggtcaattctgtagttataaacttataatctacatttgagctatcatgtaggaaattttaagtggaaattttagtctgcctttttaagggatagcatgattttgtttcacagttacatcatatatttctttataacaattggaggctctcctggaagcgaccacaaattttgaggccgaaaactagatatccccacattaatctgtaaaactaaaaatctatccatctatgacatctacaactgtatggtaaatgtactgattacaaatatacagtctttcctaacacatgaaccgatatacgactctagcatggtatcttggttagatttgattgttggaaccactaagttgttgagtcgattttgtagcatataaaggacactaaagaaattttagttaaaatatgcacgggttaaaggctaggctggtttttttttttaataaaacgcatgagagctgtgcttcatttcattaagaaggaaaaacaaatcacccatacaaccaagggctcgtgatcccttcccaaaacacatccgcaaatagtgccctttggttagtgacctacaaaggaaaacttggagcgcaagagctccagccaggcaccatagccttagcttctgttgacactgcctgcaacacctccatgatgtttggaattgatccgttgaaaacaaaagtcattacgctgtttccatatttcgcaagcaactagggtaatgaatgaagtcacccccttattttgctccttag

SEQ ID NO: 307 - DNA, 364 bp, Oryza sativa
  source 1..364: mol_type = genomic DNA
ggtgcgcccctccggaaaccctagcccctgatatcaatctggtcatcccctcctcttttgggtgctatttcgtatggccaagtccttcttgagattcatgccttccaccctccaatatcgagaatatttggacgatttgaatgggttgatgtgttcttttggatgaaagagttggaagtagttggacgaaatgcataaagcgcaaccgtattagtaaagtaatttttgtgtgataattttgtggttgtgtgctgacaaattatcttcgcagcagctaggtgcctgccttatctagatgcagttttgctgccagttcaattcgtagttgctttcagctgaccaatcaattatccgtgttctctag

SEQ ID NO: 308 - DNA, 81 bp, Oryza sativa
  source 1..81: mol_type = genomic DNA
ggtggtgcaaatattgggaggtttgtgatgcaatgcaatttatctttatcctaattgaacgacattcatgtttatttgcag

SEQ ID NO: 309 - DNA, 77 bp, Oryza sativa
  source 1..77: mol_type = genomic DNA
tgtaaaaagcaaacacttggcgttgtttctttttggattatgtttctacttgagctaatgaggtgatagacttgcag

SEQ ID NO: 310 - DNA, 1199 bp, Oryza sativa
  source 1..1199: mol_type = genomic DNA
ggtaggacgcacgatctttaagtcttacctatctggttgtacggttataggcaatgagagtgaactacagaactagaggaatctgctgagaatatagtagcacatgctccaccctactggatcaactacagtattattgggtttaaaaattcgagttccaccctattgcaagatccagatgtccttttgctcttgtatggaacaaaaaggctttaagatgggctcattatattatgtctttggtgttgatgtttttttcttagcagccaaatgtatgttacattatgtacaattaagtaaactatgtgatcttctaatcctttacaaaggacccaacaaaatgacatgcacacatctatgtagatcaattcacaaaagatcacatgttatggaactaaacatcacaacaactaactccttttcatgagtaaagatatgctcgggcactttggtcttaatgcatagccatgatcaggtgggccacagaaatcctgcttcttgcccatcagtgccttgattgggtgagttagcacttttcagtgaacaaagaaaaatagcattggtagagggagaaaatggggagatagagtggatattgcttgttatcctttgtaagcaatgatacctctcctgcctctaagctgaaggcagaaactaaagaatagcaggaagcttattcttgtaagtcgacttcacctagatatggttcaggattgacacaataaaacactgtatttcactaattaatataagctcaaaattctagttcaatgttaagtctatgtttttgcaaatagatccttgatatccaatatccatgaaaaacttgaggggctatcaaatatataaaatactcataaggtgtgttgaaaagagaaaattgatagtgacattcatttatattgtacagtgaatctttgaaaatattgcaaagtgaactgattagttcatcactttctccaactcttctggatttatagattatttttgaattattcttttgtctaatttgaaagatacttttatcttttcatctttgggtgtagctataaatgactacaactgttcgattttgcagtatagctctgttagatggtttgagtgtttgacatcaatgttcttgagaccaaacttgttttgtttaataaagatcctagtgttgtttctatatgctgatatcattgcatttacctcttcag

SEQ ID NO: 311 - DNA, 860 bp, Oryza sativa
  source 1..860: mol_type = genomic DNA
ggtactgtctgatcattttgcttgttttatggggacacttcattctttgttttctcttttcatagttgtccgttagctgaagctaaattgtatactttaagttagggcactgtttgtgtagatatgcttgtccatttggaagttgtacatgaatgttatttgatatggcttattttatttgacattataattcatttgttatgccttatgtggaacacccccagccaaatgggtggtaatcctcagattggaagttaacttggatttgggcagtgtttacacaattggagtcaaattcaaatgtagaaacttggggtcaaaccatttgtgcgcgcatttgttggaaaggagggaagagggcagaatcctatgcaagctgccatgcgcgtatcaatgtctgtggcctgtgcctgagcttatggcagtagtgaactttgtaccctgtaggaccattgcattatgatttgtggctagtttagctggagcttggagcgagctaattctgttattttgttggatttaactcttatgttttgttatggtatttctttcccattggatatatttggattggaactttgcagtagctatattgatgtggacattgtacttcagaaacaattgtaactgttatctgaaaaggtggaagcttagtcgaaatttgcatcccattctttttacatagcatgtatcgtctagctgcttaagattattggattgggcatagcatgggtattagtggatttgtttaattccagggagattagaagagcagttttgcatcaatagtgaagtaacctatgttttacctatactattttatgatatcaatgttttgctgaactactcaaattggtcag

SEQ ID NO: 312 - DNA, 1651 bp, Oryza sativa
  source 1..1651: mol_type = genomic DNA
ggtattagtatgtgacttaattattatatgccattttccttaagctcattcagttataaacttatagtaatgctccttctggatgtaattgacaacacagccatttcaaatgattaagctaggctgtggttacattcaagataatcagtaaggaacggaacatgatatttgttggaacattgtttattaagtaaaaatgtattaactgatttgcattacaacttcggtagaaaggatttgctcaaatgtattgaacaaagctgacgccatccacaaatctgttagaaaatttggcagaatctcccctgtatttaattacatccacgacaaacagtttataaaaataattaaacatcacttaacccgtagacatgatagcacacaaactctcacagtataaaagtaaacaataattacaaagccaaatgtgaactattcaaatattaaggaactatgtttagtttaattctgtgagctgtggagataaggggtgctacttcctgcccatacatactggatacctaaaaccaaataaaacaggtgagtataatatactcagcaagtatagtatggaactacagaacggaaatagaaaaacatacacacagcaaattgcaataaaaaaacacatttttctttcaagacaaaggattcattttattttcttcgaaactcagcaagtatagtgccactagtaagccctagctctgcttacttggctttgctggcaaatgctctaaagatgtattcactcttgtcccgcctattgtttcaaggaaaagaaaattttgtttcaaagacaagaaaaataatctcttttgtcttgaaagaaaaagagttagtagttttagtgtgttctgtgtagcactctaggtttgtggatacggtacctagggtgttatatttctccatcttaaaacacatatcaggaacatgttgaaacaaagcgttagtattttctttgatctcaatatcccttcatcacttctctctttttttcgttttttttcttttttgtgatctgcaatcaagtccaatattgttcgatgctttagcatgcacccaatttctcagacctacccaaaatgggtcaagtggttcatcttctgaaaaagcaatatacgtgatgaagtacaattgtgatgaaagaatgagatactaacgttctgaatccactagaattattatttacactttctggtatccatgcctacttactggttcttcttcttcttttttctgcataattaataaaacaattaatcaatcagtttatgctgcttgtaaggcagcatttgtacagccttgtagtgccatattgtaattttaggcactgttgattttgtgttcaaaagttaaaaatttattccaaattatctgttatttcttcctcagtttttatctctgatgtgatgtatttgtttatgaatgacataccatataaaatgttcaaaacaaaatctggctatcaaatttttagaaatattaaaatctggatttgatggctgatattttgtatgccaaaagagaaaactaagtgacaactctttattttgaatttgtcataaacctgtgtatgctgccttcttttttcttatgaacagcatagtatcacaatgctagaccatctttttaattaaaaaaagtgcag

SEQ ID NO: 313 - DNA, 957 bp, Oryza sativa
  source 1..957: mol_type = genomic DNA
ggtatttcttctttcaagtacatatgtttcctttgacttgtcattttggatattaatgcagtccccaatactgtacctttgtccttaatgctctagttactccctgtcccaaaatataacgcacacaattttaggaaaaatcaacaatttcaacatttgactaataataattgaagtaatatatgtttagttctatgcatgtgatgttattaaatttgtatttgaaagttctttcataagatgtttattttgtaattgttacatcatatattacgatgggaattatttgtcaaagctcttcgttggagaccgtgtaaaaaagttataggtttatattttggggcggaatgagtaaatgttagcagaaatattttaaaactataagcaaaggatctatctggtctcactactgcgggtttagattgatcttaacattctcactataagcaaaggatctatttggtctcacatgcttttcctttattctctagttagatgttggcaaaaagttttaaaagataaggaaaattctatttaaccccaaactaccatgatgcttaaacttacaaaatcagatcaaagtgaataaaccctgaactagttctggatggtggttttgccctcatctactagcacacaatatattcatgttctgatggcatcttgtgctatctgtgatttagtccacaactctgccctgtctgcttgacactggctgtgagaatctggaatgatctttcataatactgttctgcattgaagtagtcttgaattgacagatgaggaaaatactggccacaaagttgacatgtaccctatcttatgtttgtttttagtttttacccttttactataaattatattgtataatgcgtgttgcataacacttttgagcaagatttttctttttgctgatttatctggtcaaaggaagttaattattttattccatttcag

SEQ ID NO: 314 - DNA, 1157 bp, Oryza sativa
  source 1..1157: mol_type = genomic DNA
ggttagcttttgcatccaatcactgggcatttttcatttttctttcttttcacattctggatgtaagaatactctgttttacatggaaaatctaattaattggatcgttcattcgtaaagtgggacaaacgaaactccacatataaattgatttccatgtactacagtactatctattcctctgaagtgctccaataagtgtgacaagacacaaatttgtaaagatgggatgctagaattttgtcattttgaaagtttgcatcatttttaaggaacattggaattggtatgaaagtacttggatgtacacttggaaaaccattctccaaaaagggatatcatttagaattgtacacttcaatagccacagggtggtttccactattctgatgttattgttgagttaatcaatgaaggttgtattcactgaatggattgtattgtgctcctgtgtttatgctttgatgcattattgtctttgttaataactaaatatactgctgagagagtggccaacttgttaaaacagttgagatatttcggttgcaatgtggatacttttcagagttcagatttgtgccagagcaggaattttcttagcacagcagatatagttgctgaacagttttttcttgtaccttcattagataacatttcaatgtttggtccaatcccagagtggaactaagcccttagcctactgcaaaaagtactgcttgtagcccagcttgacactgattatagatgctaattattctggttttaaaccagtccatacttcaccagcgcacaaaataagggacccatgaatgtttcatattcttgggctatatgaacgacagaatttcacatctaaaagctaggatttaacttgttttttgtgctcgaaatcttaagttgacgctggctcagctaggggaccagctggtggattctaccttctgtgttcttttagtagttattgactgattgtctgacaacaggtttaatgattctaatgcggaactacaaattgagaccggttaggttagggaacttcctacttgcacggctgtataaggcttgtagaagaatagccattcaaccaagttatgtgtttgatgatccacaagttgagacattgaacatccttatttcttctgtatatgctttgatag

SEQ ID NO: 315 - DNA, 361 bp, Oryza sativa
  source 1..361: mol_type = genomic DNA
gtaagcatccacatcctctttctttctcagaattcatctatctctttctggggatctggaatttgcttgcgttcattaaccctagcttctcttctagactagatctggaagaagctcttggatctcttagttccagagccttaaccttagtacaagtagcacttcgtttgttccccaaaagttggatccgcccctgcgagttttgtggtttttccgggtgcaaactagtatagtagagcttaagaaatgaagtactcatcaatgatttagttgaagaaatgcgtcgtcgtcgagttgtatagcaacaatgatcaggcactactacttgttaaagtattaactctctgcagctcttctgtag

SEQ ID NO: 316 - DNA, 446 bp, Oryza sativa
  source 1..446: mol_type = genomic DNA
gtgaattccgcaacaaaaaatctttcgattcgcttccccccgaattatctagcgcctcgtgctttccggtgaatttttttttgggtccgatcgattctttttttttttttttggggggggggggggttgggtggattattgaggatttgaggtgttcttggtgcgatcggaacatttttggttcgtttgtttggggattcttgcggtgttctgggtagaatcaggactagctgttcttctcggtgttccgatcgtttggggattagtgaggatttgaggtgttcttggtgcgatcagaagatttttggttcgtttttttttctctttcggattcttgcggtgttcttggtagaatcagtactctcggtgttccgattcccgcgttggaatttcagaaggtctcacccaccctgacgtttcgcgtttcgtggcgatttctctgcagg

SEQ ID NO: 317 - DNA, 102 bp, Oryza sativa
  source 1..102: mol_type = genomic DNA
gtatcatcatcatcataccatcacccccactatctgtttcgtttcttgaattcttttccatggaatccggtggtcgatcgagctctgcttccggtggtcagg

SEQ ID NO: 318 - DNA, 989 bp, Oryza sativa
  source 1..989: mol_type = genomic DNA
gtgagcatatccctgccattgatacctgttcttttgttatactactaagttttactgaattagattatcatttctgcaatattatgagaaatttcagttcactaagtcatcttgaagtgctttgtgctttatgaaaaaggtcgttgtatgtcattttcgtttcactagtgcgaaactactgcttcacatatccaaaatgttgtgaggagcttaatcatcttaattaggtgatgccagctgacttagtttggttccttgtaaaggattattagtgttggattcgtttataccattatatgtagttggtgtgcttgacttgtttatccaaccaaccaccagtttaaatgagctgactgaactaaatctcatcaaatctcttaggccgagtttagttccaaactttttcttcaaacttccaacttttccatcacatcaaaactttcatacacacaaacttccaacttttccgttacatcgttccaatttcaaccaaacttccaattttggtgtgaactaaacatacccttagtacataagttttgccttgtagttgaaataataactgcacttattccacatactgtgttacataaagggagtatgaactgttaaatgttactagaaggtctgatgctgggtatgacttgagggttgttttctgcaccattttccatatcgctaatacttctgtagcttggagttggggcatgttttccagcataagaatgatatccccttaattagaaatgtgtggtaatgaaaattcttgtagtgtcaactgaaaccaaaacatcagttcagttctgaacttctaaattctaaaagcaaacatgctactactttatttaatttgttttttctgctgatgtattcttttggtgatcttttatctagtaacatttgttatgattaaaagccaagctgatatgtttacttattaggctcttgctgtgctactgctcatctgaatcttgatttttgcggacagt

SEQ ID NO: 319 - DNA, 1100 bp, Oryza sativa
  source 1..1100: mol_type = genomic DNA
ggtgatcctccgccccttccgatcccctcggtcctccgagctgttcgatctgagaagaaaaaaaagaaaaatctgctggattatactttgcttgctctaggattaattcatcgccttattatggttgatgattttatttccttcgtaattactgcgtatgtttttctctcggctgtacccgatggaattttggtagttggtttggtggtgtcctggtgatcccctttggaacaatcgaacataattcttcaggtttatcgtgttgtatttagtaactgttcgtgccagtaagtactgtgtagtgattgtgattagtgatatttgctcatgcatacaggttaggtgaactgggtttgccgtcgtggggcatcatgatctccccgttgtttagagaaatcagctgtagcttttgcttttgtagagcttaccccttttttttttgaacgaaacgagcttaccccttatcagttatcaccgtggctgtgaagctacaatttctttccctgcccttttattattagtgttatgataaattgattgatgttgagatagttcttgtgatgtgtcctgatttgaactctgcgtgtaagctgtgacatgtgtcccctatttttttccgcacctcatcaaactggataggttcaggataaactatgtattattaaaaacgccaccaaaacaagttgatgctttggtttgctgctcggatgtaatgtgaacttcccaaaatcttaatacaaagatgcgcaactcttttgcgcattctcgaaagaaaaaaaaaacgccattgaaacaagttgatgcttggtatagttaatgtgcttatactctgttgtgcaatgtagtgaatatactagttagctgaaaattgcatgatatactttcaaccttgatgcttcaattaaatatattccaatctgctgggcaccgatgatttttttttaaaagattgtactctggacatctcaagcagtatatattaatacatgtagtgtttatgttattagtttacttggttttgcccagcgacttctagccttctgggtacttttgtcagagcctaacaagtgatgtgtaattatcacgcatttctgttgcag

SEQ ID NO: 320 - DNA, 82 bp, Oryza sativa
  source 1..82: mol_type = genomic DNA
ggtggttatcctgaacttagtcttttcagcaaagcggtatgttcctcatagcttaacggatcaccttcctaatgtttaacag

SEQ ID NO: 321 - DNA, 78 bp, Oryza sativa
  source 1..78: mol_type = genomic DNA
ggtatgattattacctttgcaatagatcgtgttaaaattcaatgtgttggggggcagtgacacttcttttatctgcag

SEQ ID NO: 322 - DNA, 540 bp, Oryza sativa
  source 1..540: mol_type = genomic DNA
ggtagggttttttttactcaactctggaagttgcacatgatgctggtgatgttttgtctcaattaaaaatgttctatttatttttagattagaagatttcacttttttattagtagtttatccatataatctcgattcaatttatactagtaggtttttcactgcccattttagatagtcctatttgaattcttaaaaagaagttgagtacacatctgtgcttgcgagcgttttaggaaattgtctagttagcgtccaatactgcacaaatggccaaatctccatgtcctatgtttatcacataaaagaggttaattctccaatagatgccgcaaattgccgccagtgttatgatttgcttttgcaatagagacaaacatgatcacattacaggaagtatttgtgcttgaagtattagtatgtgctgagattgcttttgcaagagacatagaaccggaagtgtaatagctgctgtcataactgtatttattgcacatatcctcagaatcacatctgacaacgataacatttgtttcacag

SEQ ID NO: 323 - DNA, 1642 bp, Oryza sativa
  source 1..1642: mol_type = genomic DNA
gttgctcccccctctctctgtatgcctgtatgcatgcttcttggctcgatatgccgcgatgagatttgccatggctccgccgatgtgagttgtggcggtggttattattattatttttgtttggagaagtcttgggatgattctgtcctgatttagtcaggagatatatgttcttgtaaaggggaaagtatttcatggagattgtaccagctatttcaatttttaatcactgatgatgctaggtttacgataaaatcttgagaaaattccctatgtagcataaaaaaaaagttgctcttccctctatagcacccaaacttcaaaagttccctatctaggcacttctaaaatttcccatccctatgtagcacttccgttaatttttacacttatggtgttaacttagcaggagaaaagacggttttgcccttctttagttttcagacttgcgtgtgcatgatcgttggtattttaggcgtacaagggcttagttggatcaaatgattttcttagaaactctaatataataactaggttaatgaaactttacccttttcatcctatggaattattttctaagtctcatttgttcattttctaaaatataaatgagcataaagttaggtgacaaaatctcttgttacgattattttattttcaaatttacaataatcaatcccctcggtgagaaatgggacaaacttaattacatagttattcaccacatgcgaaagactttttgaacgacagtgaaaagaacgggtcactaattaaattgatacccaccggccaccacttcggtctttaggagaaaatgacaataatatattcgccacgagataaatcccagttagaaatggaaggagcaatttaatttcaccatgagccaaatcgcagtgaaaaggatagcaaaagtcactcaagctagaaacataaagaagggcaaaaccgtcttttctcctactagttaacaccgtcaagtgtaaaaactaacggaagtgctacatatggaagggaaattttagaagtgcctagatagagaatttttgaagtttggatgctatagagggaagagcaactttttttgatgctacatagggaattttctttatcttattatttctgtgctgttgtagtagattataaattgccatatgctggtgcagcgtgaagtgaaaccgtaaaattgagaggaagcaaatatatactagtattgtattgctaggcttggctggctgtaatacggatctccgtaaaatgcggatgaagggtggttggatcgatcaattttaggcaaacttcatcttttaatgttcaggctataacctgcaactgatcattgcatctcccttacctcatttgcatatctccataatcgtacatcaacttaaattacaaaggcctgaagttaactcattgggacttttgctatcacaagtcttatgggtaacttgtcgatttacttgctggcttccttcagcgaggtttaagaaatccacatgttacacaaaaaatcacataatttgaaatggaactattttccctactgcttatgtattgaggaaataatccagtggctagagttatatcattgaatacaactgagtgacttacatacgtttttttccttctttaacttcag

SEQ ID NO: 324 - DNA, 245 bp, Oryza sativa
  source 1..245: mol_type = genomic DNA
gtaaaccctaaatcaccagatctgcgcgtttccccgccttctcctctcgctcgatttagccatagccttgtagatctaggggatttgggtcgtagatctgaagaaattcgggccagatctggagattcatgagggagtttgaaggattaggcgactaataatttctggttctccgagtgattcaatgtaggtttccatttcaacttgtttgagtgatgatctcactctcgctcgcctcgctgcag

SEQ ID NO: 325 - DNA, 911 bp, Oryza sativa
  source 1..911: mol_type = genomic DNA
gtgacgatgaatcccccctccccctcccccaacctcttcttctttgatccgtagatgcattcctgttcctgatctcgggaggcggccccgcgttccccggcttcgtttgatctggtagccccggttgagttgcgtccgaaatgccagatttgtttcgccgtctgtttttttttgtgtgtatgtgttttttttggggggaaattgtttgcttcggcggagcgaacgatgggtgcagccttccgcttgtacttctcgtttggactctgcggattggttttggccgaaccttcttggtggttggtgcatctccttgccggttggtgaggggattgcaagggacaggacgaacaccgtgcgtctcggaggaagggaattttagccgtagtttttacgctcttttttttaccgtttggaattatatggaggaatgcgtttgattttctccggagtagactgtagatttgcgtgctggttgcatgtttacaagttggcaattgggagtttccagagttctttacggttctagatctgcgaatttacttgtggggtgatgcttagtaaataatgtcacatggaagctctgagtgtcagactgagcacgtagatcgtcctagattggagagtttaatctgggttactattaaaagcggcatcctccactatcgaggaggatttgttttgttggttttactttgcttggtgtaagaattgagtagattattgaatcataaacaattgtgctcatgctgccttgcctgagaattagattccattatattatcatggatgtagcccgctttttgtaggcagctctggtagactgtaatttatttggtactgcataggctaatgattagaattatcagtcagttttgatttctaaacattgtgctgtttgctcttggtgcagt

SEQ ID NO: 326 - DNA, 82 bp, Oryza sativa
  source 1..82: mol_type = genomic DNA
gtaattcagcttagagttcatacaagtgttattctattgcaactgtgcatgtgtcttgttctcattgtttgtggaatgcagt

SEQ ID NO: 327 - DNA, 558 bp, Oryza sativa
  source 1..558: mol_type = genomic DNA
gtataacttaatctgatccatgttagttgtactctgagggaaaaaattaaataaaatgctctataccagaaacttgaaattttcaggctggtgtagaattaatttatttggacacctgcttagatatgggccatgttatcagccacttctttttcttgttgttgtgagttgtgcatggcaatatattgattattggatctgccaaccattctctaattagtatgtggactaataaactgctggcctggctgcctggctggtggggatctacctatatggctatacaatatccctatcttatgtagactctttagtgaacttttatggactattagtcttcttcgcgaagtctgtaataccatgcattgtatgagccagcattatcctagtgtactgtaccaactttccatgtgatgtgggcctttcagcttgttcatgtgatgagtgggtttgctttgtcttagctgttgtggggacaatttgggtagagttgttgtacaattatttaaagttcatcatatcattatcttctcgtcttatgccactctggtttgcagg

SEQ ID NO: 328 - DNA, 120 bp, Oryza sativa
  source 1..120: mol_type = genomic DNA
gtaagctgtcttcatcactattttagttgcgcttattttaatcacaggcaacctatccacttgtttatcaacacctgattggctaaccaactgtttattgcttctcttcctccacaaagg

SEQ ID NO: 329 - DNA, 94 bp, Oryza sativa
  source 1..94: mol_type = genomic DNA
gtaagttcccccctctctcgcccccgtccatccccgagctaaaccctaaaccctagagatctgtggcactggcgctgcttggtttttttcgcag

SEQ ID NO: 330 - DNA, 577 bp, Oryza sativa
  source 1..577: mol_type = genomic DNA
gtatacagcttacccatacaatatgctatattttgttgctccaatcttttcacttgcttttgtttatcttcaagtatttatttgtaacattgttgatgaattgatgagttagatatagaacctctgtagtcttcaattgaaatttcgaaggcacactttgaattcaactacacatggcttgtctagtgaatttgtgcataagataatctttgataatttaggattactttgttttgttatttggtagcaacttgataagaccatggttttgcataaaaaatccacttacatatatacatgatttttatgttgttgtcttaaattagaacttgcacaggtaaacaccataagttgaattactgtcaaatgctgaacacacttccaaatgttgataatttttcatatttagtacatgtgtatgtgttaatgtaaattaagtcaagaagggacaaataaatgccagttatgttagtctctatacttgattaattgtattttaagttgttatgaagtacttctagataagcattggatcatgtgttcttctctcattggatgtctggataacatcttgcag

SEQ ID NO: 331 - DNA, 910 bp, Oryza sativa
  source 1..910: mol_type = genomic DNA
gtatgcgcattggtcgccatttctccatccgttcaactgttgttcttcttgttgttgccatgttattgctgattgctccgttgatccgtacgttcacacaccgtgcaggtgcatatatcgcgtttaggcaacatatagtgctagaaatcatgtcctttgccctggtagcgtgtaaactgtaaggttttctcattttgtttcgtgcagtgcccaagtatatatatcgcacgtgagtagtaagtgatagatcgatctgttcatgtagcggtgtgtttgttactgagaaaattaagcaatattatatagcattctggttagtcgtcttcgttgcgtgttccctgttgccttatttagggcaggtttagttcccaaacaaaatttttcacgctgctacatcgaatgtttggacacatgcatgcagtattacatgtaaaaaaatcaattacacagttcgccaggaaattgcaagatgaatcttttaagtctaactgcgccatgatttgacaatgtggtgctacagtaaacatttactaatgacagattaattaggcttaataaattcgtctcgcagtttcctggcggaatctgtaatttgatttattattatactacgtttaatactttaaatgtgtgtctgtatatccgatgtgatatgcaggggcaaaaaaattttttttgccaactaatcaggcccttagtcgctactatttatttgaaacggtgcagatcagcagatcggtcttgtaacggaagaaaccaatgcttttctgcacatctaaactgtatctggagagttttttgtacttttgacagttctagtttctaggattataattgtattacgcttcgatttcatgatcgcattttgtctaaatttaaaattctcataacaccaaatctgcctgttagg

SEQ ID NO: 332 - DNA, 123 bp, Oryza sativa
  source 1..123: mol_type = genomic DNA
gtacatttgcttcgcgtcgcgcgcactcgaccgatcgattcatgtgcatttacgcttgaatcgaatgctttcataagattgatccttgtgtgctgaatccgacgcactgtcttctcctgcagg

SEQ ID NO: 333 - DNA, 223 bp, Oryza sativa
  source 1..223: mol_type = genomic DNA
gtaaaccttcatttgctaggttgccacttgccattgttcatgttctttgttttgatctgctgttgatgactttatcttatcaagtcatatatcggcacttctcactgtgtgttggaatagttgtgattggcttgatcagtacgctcttgcgatgctatgctttactgtgctccagttgtgttgcacacatctgatgtttcttttcttcgtctgatttttcaga

SEQ ID NO: 334 - DNA, 1148 bp, Oryza sativa
  source 1..1148: mol_type = genomic DNA
gttcgcgatcctccaaaccccctccctccctcccggcttcgcatcgctcgctggccttcgttaggttgtacgcgcgcgcgcgcgcgtggttggtttggttggttcttcgtcggaatgcgagtggaggagtgggttagcgaggtcggctccgatgggcgcgcgggagggcccgtccgtagtttctggctactggctagggctccgatgaggcgaggagtgaaaggcgcgggtgtgtgtacggtgaattttggatgatccgtgcgaacctggtggtgtggtttctgtgctgaagtattgatgattcttactactactatctcacatttgggttaaatttgggggtttctttagtcatttagtgccggtagtaatccaaatccgctagggtagttggaaatggaggttattggaaagcgtttgaacaaatattcgtgtagtatgaacaaatcatcttgtggtccattgccttggaccatggggatcagggcaaatgtgattcggttgttcaggaacttcagatgctacaagtgggtggcgggctggatgtttcgcggcgcagaatagttatgtgtgagttttaggactcctatattcaatatctaatgttggaggtttggttcttggtatccttaagttaatagccaatgtggtccttgtccctttgcacacttgtccactttggtcactttataatactatactagggccttgtttagttccaaactttttcttcaaacttccaacttttccatcacatcaaaactttcctacacacataaacttccaacttttccatcacatcgtttcaatttcaaccaaacttccaattttagcgtaaactaaacacaccctagtacttcctatgtgccatcagctgattagcattactgtaacattgcaatacttcctggggcacacctgggatcataattacattgattgctgggatatcaagaagtaaagtagcgaatcaaagtccctttcttggtaaatctgtatatactaatgccccctttgattcaaatccatttgattgctgcctggtatgatgttctcttccattgtaaactatgtgcaattccaacgagagaatagctgggttatatttctagcagcttaatgagtcagtaaatccaatatttgtgcag

SEQ ID NO: 335 - DNA, 1696 bp, Oryza sativa
  source 1..1696: mol_type = genomic DNA
gtgagcaactgcctctccatgtccaggccctcccggaccctgcttgctttctgttttaatgcttgatgtttcttgcaatcggagatgtgttctagttctgttagatgggtgaactactgaactgagttgctgaagtaggtgtggctggttgcttttgcttgtgtgttgtcaaatgttggatccgttggactgtaggagttcagggatgcgcgtatactggttgtttgttgttcttggtgaatgctgatccgatccattgctttagttgatggatgtatccgatcttgtttgtgctgaggtgacgagtagtcttgcagtagatctcttcgtgtttatgttgtgttgtgctaaggtcttgtagttcccaaaattttttcccaaaaatgtcacatggaatctttagacacatgaatggagcattaaatatagattaaaaaaactaattgcacagtttgcatggaaatcgtgagaccaatcttttgagcctaattagttcatgattagccataagtgctacagtaacccacatgtgctaatgatggattaattaggcttaataaattcgtctctcagtttctaggcgagctatgaaattacttttttttattcgtgtccgaaaaccccttccgacatccggttaaacgtcggatgtgacaccaaaaaattttcttttcgcgaactaaacaaggcctaaggcgtgaagttgggggtatagtttctctgaattgtagatcaactgacagactttcgcatgctcatagccggtttgtttgcggtactcaagaaactgtcttgattggtcattccgtaggtggggacttgtgaaaaagctgattcctttcttttcatttccacggttgctttcttgttggcgtgggaaaaaaacagttttcagtactgtaccgatcgactttcttttgagacttttttctcctcaacaaaacatttcatagttcacacaaaaacacaagcataccaacgatttcattatgtgacatggcttctaaaatctgaattaaagaagcaagttgcttaactgaaaactgcctagtttcagaaatcatggagtttaaattttgtactaaaaaatgtatgcttatggaccactattctaagatgcttcacatcttgatgacggctgtctgatcagaaaaaaaataatgcttcagatcaaccaatcagacaatccaggatatgagcagatcatgttgcattcatttcatccactgaagcatgtcccttttttctccctgaagattggtctaaatcgattcaaatacacattgcattgtatgctcttaggagagagcaccattcctttggagggttggtgattcagaccagcctcggttgattgatttgaatttcttaactacaagtcacttgatctagttataatttacgcatcatggaccattcattttgggagtttcctatatacaactaaagtgttatacttcttcctatctgcgccttcctttttgtttgaataatcctccctctttcacaatttgcaatactagttagtcaattaatagctttgaatgtgatatcttaaagacatgtattttgtcattcatgtttgatgaagactcgtgtttttgtaggatgaatgtttagttcaagttacatttttctgtattaatctatagtctttgtaaacactgttttgaatgatttattttgtgttatgcag

SEQ ID NO: 336 - DNA, 517 bp, Oryza sativa
  source 1..517: mol_type = genomic DNA
gtgagcatccatctgcgtgtcctcttcctcatctctccctccccacgcacgcacgcacgtactcgtagcttctgttcactgttctagatctggatacttttcgcttcattcgccttattaaaccttgatgctggtagcagtttgtttgtttgtgtttttttccccgcgcgcaaaaaatgtttgtggggggtggaactgaatcacatgctccacgtctagatccgccacctgagtttgccttgcatcacggtttagtgcttgattctttgtgcgcggttgattatcgcgtactctttttgctctacaagttctagatctcggtgtgtcggactatcgatatgtagttttgcatattctgttttgttttctgttcgctgcaagttttgatgtgccaaatattagcagttgatcttttgagattttgatttcctggagggtttgcgtctagtttctgttggaaaatggccatttcgtgacgtgttgcggcgcatgcctgttgttctgtttttgcgtcagg

SEQ ID NO: 337 - DNA, 98 bp, Oryza sativa
  source 1..98: mol_type = genomic DNA
gttcgtggtgctcattcgtagtatttctttgtagcagttatccccatgtttatgtgatttaatcgtatactttacttttcttgcgaattgctggcagg

SEQ ID NO: 338 - DNA, 75 bp, Oryza sativa
  source 1..75: mol_type = genomic DNA
gtaataactcactcacatggttgagagttttaaaaaatattcactttattcatgaactgttgctcttgatgcagg

SEQ ID NO: 339 - DNA, 91 bp, Oryza sativa
  source 1..91: mol_type = genomic DNA
gtaaaccttacgcctacactttatgaggtagcaagaatgcaggtatttctgctttctgttaacatcattcttttggcatctatgctacaga

SEQ ID NO: 340 - DNA, 893 bp, Oryza sativa
  source 1..893: mol_type = genomic DNA
gtaaaacaaacaaaaacggatctgatgcttccattcctccgtttctcgtagtagcgcgcttcgatctgtgggtggatctgggtgatcctggggtgtggttcgttctgtttgatagatctgtcggtggatctggccttctgtggttgtcgatgtccggatctgcgttttgatcagtggtagttcgtggatctggcgaaatgttttggatctggcagtgagacgctaagaatcgggaaatgatgcaatattaggggggtttcggatggggatccactgaattagtctgtctccctgctgataatctgttcctttttggtagatctggttagtgtatgtttgtttcggatagatctgatcaatgcttgtttgttttttcaaattttctacctaggttgtataggaatggcatgcggatctggttggattgccatgatccgtgctgaaatgcccctttggttgatggatcttgatattttactgctgttcacctagatttgtactcccgtttatacttaatttgttgcttattatgaatagatctgtaacttaggcacatgtatggacggagtatgtggatctgtagtatgtacattgctgcgagctaagaactatttcagagcaagcacagaaaaaaatatttagacagattgggcaactatttgatggtctttggtatcatgctttgtagtgctcgtttctgcgtagtaatcttttgatctgatctgaagataggtgctattatattcttaaaggtcattagaacgctatctgaaaggctgtattatgtggattggttcacctgtgactccctgttcgtcttgtcttgataaatcctgtgataaaaaaaattcttaaggcgtaatttgttgaaatcttgttttgtcctatgcagc

SEQ ID NO: 341 - DNA, 87 bp, Oryza sativa
  source 1..87: mol_type = genomic DNA
gtaagttccatctttactactatctgttcacaatttctggaaatgtgattgtttggatgtctaacatgtggtgccgttcgtttcagt

SEQ ID NO: 342 - DNA, 113 bp, Oryza sativa
  source 1..113: mol_type = genomic DNA
gtactgccctgcatctttccttgcagcgctatgtactccagttatttgctgtaagatcaatgtaatgtgcaatttgtcttgacatcatgtggctaatgctaatgtgctgcagg

SEQ ID NO: 343 - DNA, 448 bp, Oryza sativa
  source 1..448: mol_type = genomic DNA
gtaagaacaaccaaaaatattcttgaatctgtttgtgcctttctttctcagattctttgtgctatattttggccatgtaaatgtaatatttgactgcagttcgaatccagttcataaggccaaattataatcttcttgcactgccatctttccaaggctaatcaattaagctgaagcttacatgctgtggtgtgttcatacagtttgttaggacttgattacataaaaaaactagaatatgttaggacttgatttataccctagatgtataggatcaagtttaacatttgtgatgacaaaaacatccattttaattcttcagtgatcatgactgcattgccttgttactactaaataaatagattgtccatattgttcttaatcaatcgatatagtcttactgcattggaactaatagatcatggtccattttgtcctgaatcaacag

SEQ ID NO: 344 - DNA, 83 bp, Oryza sativa
  source 1..83: mol_type = genomic DNA
gtaagctgtttggatctcagggtggtttccgtttaccgaaatgctgcatttcttggtagcaaaactgaggtggtttgtgtcag

SEQ ID NO: 345 - DNA, 249 bp, Oryza sativa
  source 1..249: mol_type = genomic DNA
gtgagcacattcgacactgaactaaaaggctgtgaggatgaattttaattttgacattcacatgtagatgagatttagttctgcaatcttcaattgtcatacagcaagactatataatagctttcaaaataaaatcataggcagttctcataaatggaatcatgtttgaacatcctaattctgttggcatggagtgctttgacattttgatgtgctacagttgtgaataactgaatttccttttcccag

SEQ ID NO: 346 - DNA, 1172 bp, Glycine max
  source 1..1172: mol_type = genomic DNA
ggtatgtgagggggtttcatgggtaaaggttgcatcattttagggttttgtgggtgggttttgaattggttgtgtgaatttgttgagtgaatgaaagatggttcgtgtgatggaagggttttgtcgttggttcgcaaatgatggtttgtgagtggtaccttttgtctaaaggtggaaactttttagggttttttgggtggttttgaattgggtgtgtcatggactttgtttaagggttttattggtgtttttgggttttgcatgtgtttttcttgaagacggtagccttagatgtgttttgtggctgatttggaatcatgttgattttttaaatgaaagtggttatttgaaggattttgtggttgattttttagatgagaagtatattttgtggtcgatttttgaaatggtgtttatttccagggtttggggttaatttctgagatgagacgtttatgttgtgtttgaaattttaaatggaggtgttatgtggggttttttttttggtaaaggttgcagcattttagggttttgttggtgggttttgaattggttttgtgggtttcatggagaagtttatgagggtttgttgggtttgtttttagtgttgtgggtggttttttggtttttcgaaattagggtgtggggtggtggttttcaattctttgtgtgaatttgttgagtgaatgaaagatggtttgtgtgatggaagggttttgtgggtggttcgcaaatgagggtttgtgagtggctaccttttgtctaaaggtgatagctttttaggggttttggggtggttttggattgggtgtgtcattgactttgtttctaagggttttgttggtgtttttgggtttgcatgtgtttttcttgaagacggttgttatctttgttaacttgatgtgttttgtggttgatttggaaacatgttgatttttgaaatggaagtgttcatttggagggttttgtctttgatttttgagatgaaaagtatattttatggttgatttttgaaatgatgtttatttccagggtttggggttgatttctgagatgagaagtttatgttgtgtttgaattttgaaatggagttgtttatttggagggctttgtgggtggggatttgaatgtttgttctgtgattgtttttgagatgtttcttcttgttgcag

SEQ ID NO: 347 - DNA, 107 bp, Glycine max
  source 1..107: mol_type = genomic DNA
tgtaagattttacaaatcccatataaccgtttttacaatcaatattagggagtttgtccaattgttcaatgaggatatactgactgtgttgtttcgttcttgtgcag

SEQ ID NO: 348 - DNA, 413 bp, Glycine max
  source 1..413: mol_type = genomic DNA
ggtaataaatctttcacattgcccttactagatactaatattcaaatcttgaaccattctctgtcactccgaatttcacattcaatatatcacaattgctcatcatttcaccataaaatctagatctgtttcggatattactcatcaaactacacataatatgacgttagttcttttttttttcttttttaaataatttgtttataattcgaattctgtgttgtttatggtcaactcagcgttaatccactttgatctaacgtcctcccatgcacaatctacagctataccttcgtaaccatctacgtgcattctttgtaaccaatgttgcatttgttgagcgtactagttggaaatttaaaaagtttctttggttggagtggatgctgagcgttactgtgttgtttttttag

SEQ ID NO: 349 - DNA, 110 bp, Glycine max
  source 1..110: mol_type = genomic DNA
agtactgtttctttccccatttgcacccatttcaaaaattgtgccttttctttgattgtgtaataagaaattaacaattttttttttcttatggtgatctcttaattcag

SEQ ID NO: 350 - DNA, 339 bp, Glycine max
  source 1..339: mol_type = genomic DNA
ggtttatgtttcttcaacacataaattgaaacaaactctgcaatatcattttatgagtaaaccatcaatttagtctttcaagtattaccctatttgtcaaatagtccttaaattaatgaaattatgtaagtagttcccaaagtattgaatatctatcaatttagtccctatgttgacaatatgatacattttactaacatctagggatcaatttgaaggattttttaagacttgggagactatttaagagaaaagagtaaaaatttagtgatgaaattgatggttcattatcgggttttatgacatgtgatctgactttcttatcatcatatttttcag

SEQ ID NO: 351 - DNA, 144 bp, Glycine max
  source 1..144: mol_type = genomic DNA
ggtacatgagggatcttttgtttgtgtattaaatttgttgataatgtaactttgacatactttttattggttttatgggaatatcattttacattaatgttacttctgtgaatttgaaaaattaattgcaatgaatctttgtag

SEQ ID NO: 352 - DNA, 331 bp, Glycine max
  source 1..331: mol_type = genomic DNA
ggtaagcaattttttatttgtttggttagcttgaggctgtatagtttgaacttatctgggaactttgaaattgaaataaacacatgtcaacatccattagcatctataaagtctgtatgttcaacattgcatttccagatatattagaataaactgaaaatgattcatttcattgtgaatgatttcacttgacatattactaaatggggaagaaacacattctgtgaactgcattgcatttggaaattgtgattgtagaaaacttgtataaagcttccatatatcatgtgattgactttataaacttcatttatttgccttctttttgcag

SEQ ID NO: 353 - DNA, 106 bp, Glycine max
  source 1..106: mol_type = genomic DNA
ggtttgttctcttcattttttttcctgcttcttggaatgttatgttatcgtgagatacattcttctatgctaataataatgacacgaactgttgttttgagtgcag

SEQ ID NO: 354 - DNA, 302 bp, Glycine max
  source 1..302: mol_type = genomic DNA
gtatgtatatggattcatttgtgtgttgctttgtttgttgatcttataggttttggttttggagaaaacttatatgcaattccataaatgcttttagtgttgttttctaattgaaattggagttttacctcaataatccgtgttagcattcaatggaaacctttattatatggattaccgaggtgaaattctaattctgattggagaacaacacctaaaacagaatggaactgtatctaagttgtcctttggtttttgatgatttttctctttcggtgttgatttgtgttcaattttgcagg

SEQ ID NO: 355 - DNA, 561 bp, Glycine max
  source 1..561: mol_type = genomic DNA
gtaaagattcttcaatgtctgttttttccttttcttggtttctggtaatttggggcatggtgcatggtacttgtgtatttgttgctgtcacgccacttgtatttcattagaatctcaagatgattttcaaatgaatatagtttaaatgtccatatgaaattgtgtactaaccaattgaatttcattcttttatttgtaaacattttgtgggagttaataatgtcgtacactctgttcatttcattattagtgcatattttcataaaattgtgagactgtgagatctaagggactttcaatacatatttaaatggattttgatgcatggatcatggtctttgttgatgtcatgccacttgtatttaattagaatttcaagatgattttctaatgagtgtagttgaaatgtccatatgaaattgtatatactaatcaatcacgttttttgggaattagtaatgtcatacattctgttcatttcaacaataatgcagattttcaagaatagggtgagaatgagttgaaaacgtgggttttaactttttggtgctttcatatagg

SEQ ID NO: 356 - DNA, 519 bp, Glycine max
  source 1..519: mol_type = genomic DNA
gtacagcacttggcttcaataacatatgaatgaaatttgaggggttctgtgaatagatgattctggaaagtggaaattaatcagggaattctatttgaagaatatgtagagaccaataaaattaaggaaaaagaaaaggaggagggaataaccaacataatattcagttaataaagggaaaggaaactggtttaaattaaaatagatgtgatcgtgtgaaacaaatgtagtttgtagagacttatagtttatggtaattgtacaactttttttagcttcccttcttaaaagaagaagcttctctaattaagttttgtgaaagctccttttggtttcttcactaaaaatttacttttattttctagggtctttttgaaattatgtgtattgttcaacttctctcctttttaagaaaaggaccaaaaacttgtgcaaacactatcttagtactgatctgatcctattttctgataacacttaaatgtattcctgataaattttttctttcttgagagcaga

SEQ ID NO: 357 - DNA, 108 bp, Glycine max
  source 1..108: mol_type = genomic DNA
ggtattccactattctcctctcgccaaccctaattttcactgttcctttctctgcgaattggtttttttcggttaatgctcgttttggttttcgtgaattattatcag

SEQ ID NO: 358 - DNA, 813 bp, Glycine max
  source 1..813: mol_type = genomic DNA
ggtactgctttctcaccttttttaactttgcaagattttgtttaggtttttgtcaataattatgcataattgactgaatctttatgcttgtctgttacgtaaagatacgagtatttaacattagatcctatcatagattgcccttggttaatgagtgcttctaatttctaattacttgaaagagtgataaagtttttttattgaaaaaagaaaatatttataccgtattttttatatgataaatgatttctttcttaataaaaaaacttactagtattttttaccactggttgctccagtttaaacaaagatcttaagttcgaacattgagtgtataattgctttaaatagtcggagagtgttttgctgcacgtaatggttctacttggctcgagcataattgtgtcatgtggaggatacatgtgatcctataacaaaaaaaaaaacttactattagcatcttaaaatcagctttaaaaggactgatataacattttcctaaataaattttgttttcaatataatgaatattttattttatttttcatacatttgtttcttagggcattggctaacatttagctttaatatgtatttatgtaaaatcttgttgctttgtacgtttgcattgtttgttgtggatactctttcatttgataaataactaggtcctattactcctatatgtttttgttgtttctgctttaatagctgtattattaagacaatttctgtcccgacattggtcctttttgcttgcctacaattgtgtgccgtactgaaatatttgttcttttacattgtacaacatag

SEQ ID NO: 359 - DNA, 95 bp, Glycine max
  source 1..95: mol_type = genomic DNA
tgtaaatttcctcttgtcacaagtttaacttgtatgcttcattattttagaagaacttgttgagaataacattactgacattttttatcacacag

SEQ ID NO: 360 - DNA, 246 bp, Glycine max
  source 1..246: mol_type = genomic DNA
ggtatggccataggtggaaaagtgattcatttttctctttccccctagctgttagtttattgtcttttcttctatggtttatttagtgttgtcaatactactagatttggttgatagttgtagaacataatggccttgagttgatatctagtagttctttggtttaataaatatatgttcttccttttttggcatttgaataattttgactcactctttctaatttaatgtttgttgccagagcag

SEQ ID NO: 361 - DNA, 191 bp, Glycine max
  source 1..191: mol_type = genomic DNA
ggtactaatactttgcaacctacacaaaaaacttcatattttactagtgaccttcaatagaaaactgatttcaatgcaaaattctcaagtacactgtttttcccattaggggtacatgtctggattttgtgctagatgttgtatatgtattttttcttctaaaagttagttgtgcttctctgttctggcag

SEQ ID NO: 362 - DNA, 942 bp, Glycine max
  source 1..942: mol_type = genomic DNA
ggtatatttttatgttatttactgaattaaagtattatatatgtcaatgaaatgagtttgtcatttctgttgtagattattgtaatatcatccacctgcatatggttaaatttgtaaataggatctcgttttttattatcaccattgtaattatagtagggggtttttttggtgaattgtaattatagtagttaatattattaatctgcttgaagttactctcgagcctgacagattgttgtctttatgggcaaaggttgataatgtgatgaagacaattattttattttgacattatatgcctttattaagtgacagttgcatgtgttgtatcaatgttgttttgaaaggatatttttgtatcaatgtacctcatttgctctttgctatagtagctgattacccagtactatatcagcaataatagtgttaatatgtataattatttttcaagatggcttggtaattaataacaattattcattcatatgtactgcataatacatataaaggaaattctccttatggtccttttagaagtttgaagtagataaagtaaaaaattgtaaacgtaaccttgttaaatagagtgcggctgttgaaaccaaaacttgttgctacttttatagaggatatgcccttatagggaaaaaaataagtattaacatttaaaataaccataaaaataaatgtagaaatttaatttcttttaaatattgaaataaatgaaaagaaatccaccgtacatgtgattgtgcatattggggaggccagtatgtaataatggcaagttgtgattagttctgacaacaggaatattcaaatatatattgtctttagcaatcttgtcttctagataatattagagttccaaaaataggatcaaaataaaatcaaccaagtgtgttggagtgttgaaattatttgtttgggtatttccag

SEQ ID NO: 363 - DNA, 90 bp, Glycine max
  source 1..90: mol_type = genomic DNA
tgtaagtatcaaatcatctgggttctgctactacccaactgaatgttaagttcgaagaatattttagattttattgaatgctcaatgcag

SEQ ID NO: 364 - DNA, 72 bp, Glycine max
  source 1..72: mol_type = genomic DNA
ggtatatgtgtaaattgtttttctttttccaccaagttcctttattgtttctaaaactctgcgatctaatag

SEQ ID NO: 365 - DNA, 325 bp, Glycine max
  source 1..325: mol_type = genomic DNA
ggtttgtttttgtatcagacagatgatctcatccattattaataaattgagctgtgtgtaccacattttcagcttattttgggaaagtaagcatttttttttgttttgttttgttttgttattgatagaagcttttcttaaaaaacacttgggaaataagctttcccaaacatgtgataagtgtacttgtacaatttttttctggagccacatttgcttacaatcttaatatgattaaatttccaaatatttctttgcatgatgttctttgtgctctataaggttaaacaatattaattgtattttctatattgatatttgacag

SEQ ID NO: 366 - DNA, 195 bp, Glycine max
  source 1..195: mol_type = genomic DNA
tgtatgtttgatgctttagtttctttatttatacattgtttgaggcttgcttatgtaagtaaaatagttttccctcatattaaactaagtaaagtgggagaaagcaagaaaaaagagcatgtattctatctaataaggattaatattaatattattattattatataaacttttttttttgtctccttactgtag

SEQ ID NO: 367 - DNA, 127 bp, Glycine max
  source 1..127: mol_type = genomic DNA
ggttggttcaccttaaaggataaaatcccttaaaactaatttatgattgtacttgtacaagatcatcttgtatatgggtcttgatttacaattcacaaaaaaaatctctgcattgttgatttggtag

SEQ ID NO: 368 - DNA, 701 bp, Glycine max
  source 1..701: mol_type = genomic DNA
gtataatttgttttcattttaacgacctgtgagtaacaattttttaattccattatcttgcaatcattaaagtgtgaggcaccagacttgttttttttctgttgttttcattaaactttgaacatggccaggatgaggttccatcccatgtgtattatatgtactgtttgtgcctccaggatttctggatggtttcagtacttcatttttctcatctcttttaattgagtgttcttgaatccttttcagtcatggataaaattcgataaaaattgcatgtgccagtatactgctgctagtgacatgagctgaataatttacctcttgtttgatctactagaattaggttatgtactaaatgtttgtgcaatttagcaaattcattttaaacttaagatatcaaacagagaatggtgttatcctgttaggtatataattaaggatcagaacaaagaagatggagtgaggtgtagttatcttactttgtttatttcaattacatatataaccttgcatctgttgttgtagaattttggtggcaaatgatagtgagcaaaattgcccagtgtttctctttattactagctctaaaatttagtttcttgcatgtatctttctatatgattttggttgtaactgcaattctatgcttaaataattattatttctcattatcattttttttttctgaatcttacaga

SEQ ID NO: 369 - DNA, 73 bp, Glycine max
  source 1..73: mol_type = genomic DNA
gtttgtgaatgaccatgtaatatctcattacttgttgcttttcgtttatctgatgactgttcttcatgacaga

SEQ ID NO: 370 - DNA, 397 bp, Glycine max
  source 1..397: mol_type = genomic DNA
gtttgtttacctcctgttgtcatctcgcataatgtttcgaatcttactggtcctgtgcttttgttcgaatcttattggttctgtgtttcattttgttcttttgaaggaatgtggaaaatgttcctagtttttatggtgacaactttatttcttttgagctcctttctctctgtatacatcttagataactatatatgtgatgttattttctaaaccgatctctgctttcactctggtcatatatgatttttttttccaatcatctggtttagtgataaacttgtacaagtctttcagttagctcgttatagctctagaagatggctttgccttcttggttccaatagaattgcagtttctgtacattaaatctattttttcccctttttctgacaga

SEQ ID NO: 371 - DNA, 188 bp, Glycine max
  source 1..188: mol_type = genomic DNA
gtaagttgatgttattcttgttcattgaaatagggaggaggatggaatgaataatgtttcatcttcaaaatatattttttcatttcatatgctactatatgtacttcatagcctaattgttgctgctggtttttctgtaatttattgtctgttgttgttttgttatgtgtttgtttttattatgcagg

SEQ ID NO: 372 - DNA, 624 bp, Glycine max
  source 1..624: mol_type = genomic DNA
gtgtgtggcttgcattcaaagatgtgattggtttatcttgtttcttcaacgtaaaagattataatttataatattgcatgatatttaaaatatgccaaagcttcttgcaaggtattaaaagtaaaaaaggtgcccttaatgtactaaggactcctagcgccttgaggtgaggtgccaaaagacatgcctcactgaagattggtgttaataattgaaagacagtaaaacaaaatacttgctataccacaatcacatccgtgttccacccttttatactatgaatgaagaaaaaacaatacaaatttcatcaatcgagatgtttttggttaaaaaatgataaattttagttgttaattattaattaaaaagctgttaaaaagcacagcttgtgacatgaacaaaaacgaatataggctataaatatatagaataaaaactaaattattgaagtgtttccagtgaaattttctgggtggtggttgtttttgtgtgcaatatggctggtccatttttttttgtgcttctattttgttatgcagttctttaaattacttgagagtcaatattcctgtttttttattctatgtactaattttcttatttgtgtcaaatgataattacagt

SEQ ID NO: 373 - DNA, 72 bp, Glycine max
  source 1..72: mol_type = genomic DNA
gtaatttaacttgatgtgaatctgttttaagtatctaacttgctattgctgattgttttatcattttgcagg

SEQ ID NO: 374 - DNA, 422 bp, Glycine max
  source 1..422: mol_type = genomic DNA
gtaaagttgatttatctttgccttctttctacacactcactcaagtagttcttatgtagagcttaatttagtttaccacagacatttttgttgtaaaaaggaaaaagatacaggggcattctttatatggagaatttttagagttatttttgagattgggttgcgtgcgcggggggtagtgttgctgaagttgtaatttcatgatgttaacttaatattttcatcttggttggaattctattttagttgtatttgaggcaagtgaccttttccctagaactttgatcaacatatatttgctgaaaccatatgctgtacatttattatgtatagttaataatcaattgataggttatgaagcatttcatatcaatgcatcatttcctggtaaattaaaattgatttcatttatcccatgcagc

SEQ ID NO: 375 - DNA, 972 bp, Glycine max
  source 1..972: mol_type = genomic DNA
gtatattttaacaaatgagtccttgtctatttcatccactgaatggcaatatggttgttggtgctgagttcaaatacctttgaagcttatgttgttttaacatgtgatttcaaggggtagctttcatttttctttcaagtgaatttagttggtgcctcatcccaaatatcagtagtttggacaatttttactttgttgactgccattaatacagccttgttggggacttgtttcttatcttacgtgcagcagtgctacagagttttcttaaatcccatgactccgaattttcactatctaattttggagggatgggagtttgggagattgagtgtaagaatttacagcaaggacttgtgcatataacaacaagaatttttgaaattgtgcatgtgtataaattttttaatttgtagccaaaggttttagtcttgtcatttttgtagattagaattaaatatatttggcgtctctagaaggcttgtttagtttttgctgtttttttttcctgcttcttgttacttccagatataattttgaagaaaaatctcgtatggtttcctttgggtgtttctttgatggaacttgcattaggcattggagaaatcttttgtgctaaaatattatatatatatatatatatattcttcttctatggttgcttttgggaagaaattgtgtgtgatattgtaaattatttttttttactgaattatattaacaattaaaaaagttatatagttgtaaagtacaatggtccgtctgtaagattgtgctcaaactactggactataagcatttagccaaagcttctgcaggctggcacctctgattagagaagataattaagttgaaaacatttatcaaaatttcttaggaatcagatttgagtttataatattataaaaacatgtgattgcctggaaaggttaattgtagttgtaaatattgactacaaatttccgttgcagg

SEQ ID NO: 376 - DNA, 243 bp, Glycine max
  source 1..243: mol_type = genomic DNA
gtgtgttatctatcttatgtcaatgcatctaatcagaggtttaggtgtgttttcttttaatgctaggtttggaaaacctttctaaagcttccccctcttttgcaaacctctgattataattccatttctctccaaaataagagagaccgagattaacattatatgtgggagtagtaattgttgatgcattgtacatactgtatgttctagttctaactcaaaatgaatgactttatatgcagt

SEQ ID NO: 377 - DNA, 2685 bp, Glycine max
  source 1..2685: mol_type = genomic DNA
gtaattataaactgttcaccaaacttgcgattatactagttcattaatgttaatatatatttcactttgcctatcttgtttctcccttttctcataaaagctacactgccaaatcgggctttcaaacaacaacaacgccttatcccactaggtggggtcggctacatggatcaacttccgccataatgttctatcaagtaccatacttctatccaaaccattaatttcgagatcctttttgataacctctcttatagtctttttgggtcttcctctgcctcgaattgtttgtcttctctccatctggtctactcttctcactacagagtctaccggtcttctctctacatgcccaaaccacctaagtctattttccaccatcttctctacaataggcgctactccaaccctctctctaatagcttcgtttctaattttatcctgtcgagtcttaccacacatccaccgcaacatcctcatctccgctacacctactttattctcatgttggctcttgaccgcccaacattctgttccgtacaaaatcgccggtcttaccgcagtccgataaaactttccctttagcttgatcggtacctttgcatcacataacacccccgatgcttttctccatttcatccatcctgcttgaatgcgatgattcacatccccttcactttccccatcatcctgtattacagacccaagatatttaaaccgtgtgacttgagggataatatggtctcctattttcacctctgagttagaaaccctccttcttttgttgaacttacattccatatactccgatttgcttctgcttaggcgaaagccatgtgtttctagagctcgtctccaagtttccaacctctcattcaactcctccctcgactctccaatgaggactatgtcatctgcaaaaagcatgcatctcggcgctatctcttggatttgtttcgtgaggacatccagaattaaggtaaaaaggtaggggctaagggttgacccttgatgtaaaccaattgtgatgggaaaatcgtctgactctccaccctgtgtcctaacactagtcgataccctatcatacatatcttggatagctcgaatatatgcaaccctaacccctttcttctttagagctttccacaaaatctctctaggcactctatcatacgctttctccaagtcaataaaaatcaagtgcaagtcttgttgggccatgcgatattgctccatcacccgccgtaataaataaatcgcttccatggtcgaccttcccggcatgaaaccaaattgattctcagtaacttgagtctcctttcttaatctccgttcgatcactctttcccataatttcatggtatgactcatgagcttgattcccctataatttgcacaattttgtatatcccccttgttcttatagattggcattaacgtgcttctcctccattcctccggcatgcgttttgacctcataatttcgttaaagagttcggtgagccactcaagacctctatctccaagagttttccacacttcaataggtatgttgtctggccccaccgccttaccattactcattcttttcaacgcttcctttacttcctgtttctgaatccgacgatagtacttatagttccggtcctcttctcttgtgtctagactgctagagtcatatccatatccatcattaaataagttgtggaaatacgccttccacctttccttgatatctttttcatgcactaagactttgccttcttcatccttaatacactttacttgatccaaatctctagtcttcctctctctacccttagcaagcctatatatagatctttctccgtccctggttcctagagcttggtatagtccgtcaaaagcttgggctcttgcctcactcaccgcctttttggtttcatttctagctatcttatacttatcccaagtttcagaatttctacacctagaccactccttgaaacactccttttttactctaactttgctctgaacattttcattccaccaccacgattctttacccctaggtccaaaacctctagattcacccaacgtctctttagccactttaataatctcttgggacatcttgttccacatatcatttgcacttccttgtgattgtccacaccaattctcccatatcttttgttggaagattccttgtttctcacccttcaagtgccaccatttgatccttggtgctaccagaggacttcttctctttgccctatctctaattcttacatccataaccaaaactctatgttgggtagtcaagctctctcccgggataactttacagttcaagcaatacttcctatcagacttcctgataaggaagaaatctatctgagaacatgtccctccacttttgtaggtgataagatgttcctctcttttcttaaaccatgtattggctatagaaagatccaaagcctccgaaaactccaagatggatttaccctccccattcatctctcctaggccaaaacccccatgcaccccctcaaaacctctagccacgctacctacatgtccattgagattccctcctaggaaaactttctctccttggggtatatcctgaagtaccccaaatcgggctttcattaaggataattttacactgaatcattttaatgcatttctgatagg

SEQ ID NO: 378 - DNA, 90 bp, Glycine max
  source 1..90: mol_type = genomic DNA
gtgagtatcaaaaccatttccccttctcattctctttcttttgcttctgagatgtgaaatcaattttctccctttggttgaatccacaga

SEQ ID NO: 379 - DNA, 302 bp, Glycine max
  source 1..302: mol_type = genomic DNA
gtaagagttttccctactctttttacttttctaaagttttggatttgttgctgtgtttactgttttgctgatattattttaccatttattggcctatagagtaagaaatgttgttatgctctcagttaatagtgaagaggacactgacatttttctgtggtgataggctaactagtactgcttgatagtgaaattatgtatttttataatttatagttgactagaataatttctggaaattgtatgggtagtttgattgtagataatgaattggtggttgtcttggcttgtgcgaacttagg

SEQ ID NO: 380 - DNA, 112 bp, Glycine max
  source 1..112: mol_type = genomic DNA
gtaacccttatgtaatggtttttgtgattggacttggattcgtaatttacagacttttttgttccttaaaataatgaatagtgtagttattttcttcttctgcactgtcagg

SEQ ID NO: 381 - DNA, 5633 bp, Glycine max
  source 1..5633: mol_type = genomic DNA
gtcagtactgactttctaatctgtatgtgatatgtattgtaggattattgttttcctttttgcacttgtttattgttagactatagatatgatagagcaattagatgcaagttgttacaatttaaattcaagttatagataatttagtagataattttgagattgttatttctctatactctatatatatttcttgcacactcacaattagttatgaataatatcctacttattccattctttcaatatggtatcatagagccagaagcttttttttttggaaggcaaaaatagtattattaaaataagtaatcagtaccagaggtacttaataaagtaatacaagacacctatggtgccaccttccaaaagcaaatcccaacaaacataaaacccagcaggcccctaacaagaaggaaaacaaaattaaccaaaagcctcctgtagattggtagaccagtgattaaattgggtattgaaacctttgactctagcttttaaccaagaccaggcaaggaatagagcctcatccatcactctatgaggatcaaaaggggtccccttgaaaagcaatgaattcctgtgttgccaaatggtaagagttaaggctatccaccacccacacaccctgctgtacttactccctgcaccaaatccattgcagaattggataaaatgactggccggatcagctgagagagcaccaatagcccggatccatttcatggattccccccacattccccttgtcatcttgcagtggaaaaacaaatgcccagcctcctcctgatgagtttcacaaagagggcatagggtgtcctgaatgtgaacatttctcctgagaaggttggccctggttggaagcctatccaaacataacctccaagagaacactgcagccctcggggggattttgagcttccacaaattctggagaatgtctctgtgaggaacagggctgctggaagacatcaggagcctataggctgacttagtagagtagagaccattaggttcagctttccaaaccatagagtcctgcacatgttgctgaataggtataactgagatgtcatccatgaaggctattgctaagtcattctcatggtcgaacaggttcctcctccacttaagatcccaaatccaagaattttgagaaaacttccctattttagagatagagagatgttgttgcctgctgatgaggaaaagaggattgtacttttgttgaagattacacccctcacccaaccaggtatcctgccaaaatttgatttgatccccacagccaaccttccacaccatgtactggtggatgatgttagaatcaggctgatgatagagcttcctaagatccttccaccattgggactgccaccctttatctctgccccatttcagatctgaccaacctccatatttggatataagaaccctgccccacagctgattgtggttagaagcaaggtcccaaatccacttacccctcagagctgcattaaaactagacagattctttattcccaggcccccttcactctttggtaagcaaaccacctcccactttacccaagaaatcttcttatgatgatggttacccccccacagaaaattcctttggagagacactagcttatcaacaatgctttggggtatcttaaagaaagataagagatatataggaagagcattcaggacagactttatcaaggtaatcctgccacccattgatagatttttctgattccatttcgatagcttggcttcaaacttattaatcaaaggttcccacaccatcctactggaaggtttaactccaataggcatgcccaggtacttgaaaggggtgtccatgtgcctacagttcagaaaagcagctgcctgcctggacccaattaacctgcatcccaacagccccaaaatggcttttggcataattaatcttcaatcccgaggccatttcgaagcctctaagcatagatttcagagcaaggacattatcccaagaggcttcaccaagaaagactgtgtcatcagcatattgcaagatatttataggcacattctgcttcccaaccagaaaactcctatagagatttttattaagagcttctctcatcataccggtgagaccctcagccactatattaaagagcaaaggggctagaggatccccttgcctcaaacctctagaagggacaaattccttagaagggctcctatttattaggacagagattgtggctgattgaaggcaggctgaaatccacttcctccattgcatgcagaaacctaatctttgcagcatatagtccaaaaaagcccaagatactgaatcataggctttttcaaaatccactttaaagatcatagcagacttgtctctcttaatagcttcatctatcacttcattaaggatcacaattccatgaaggatatgcctgttttttatgaaggctgattgcctttcgtcaattagacttggcaacactagcttcaatctgtttgccaataatttagcaactattttatacatgcaaccaatgagagaaatgggcctatagtcatttagggactgaggttgagatatcttggggattagggccacaaaagaggcattgcttccactagggaaggatccatgagcatggaattcatccacaaatctcctgaaatcaggtttaagcagcccccagaactccttaataaaattaaaattgaaaccatcaggccccggacatttatctccatcacaaccccaaacagcttctttaatttctaaatcagtgaaaggaccagtcagcccctgtgattgattctgatcaatagtgggaaaacaaaccccatccaaagtgggtctagaagggttctgttcagtgaacctctgaataaaaaagttagcagcttcattcttaacaagatcaggctgctgcacccaagcgccatcaataagaaaaccatggacagcatttgagcttcttctgaagtttataatcttatgaaaataggctgagttactatcaccttccttgatccacttagccctggacttttgcctcaaaagggattcataagcagtggaagtatcccatagctcttgttgcaatgctctcttggctttaacttcaagatcagatagagttctattggaagctaaggtttccaattcacacaatttctgcttcaggttctgaattctgatagctttaatgtcccccttatccttacaccactactttattgagaatcttagattcctcaacttgtttttaagggcaacagctccccacccaatctgctggtctgcactccaagcctcttctttatttttttgtttcttcatggtcacctaccattgcttccaatctatccattaaatgtagcctctgccaattatcaaatggctcatctccttgaagtcagaacttcttggtggctatataacaaggatcatatcatgtgtcctccatccgaaatcattcatgatggttaagccttcttgcttctgcctttttaggtggttaaatcattttgcttctgcctttcaggtggttaggccatttttttttcttctgccttataggtgattaagcaattttttgcttctgtctttttaggtggttaagccattttgcttttgccttttaagctggttaagccttttttgcttctgtcttatggtggtttagcctgtttgcttctcttaagagaggttaagccttgtgttatgacttctgcttaatagttaagtttgcatttgttggctttgagcaatgtgcggactttctccccaaagatcttacattttcgcgtcacaattttatgaacaaaattggcattgtctttgccaccatcttgtgggagtgtgttagactattgatatgatagagtaattacagttaaaactctataaattaataatgtcaggaccggagaaatttattaatttagagagttattaatttatcgataaattaataattattaatttaaagagtttttaagtaattatactgtacataccaaactttatgatacaatacaaaaatacaacacctgagctattggatgcaataagaaaagttagagatgagctccaaatagacttgaactttaaaggaaaacagacaactattgaatcatatttcaatagagtgtaatatattttttttagtttctatgaattattaatttatgattttcttgggaccgaaaattataaagggatttcacgaaaaattattatcttattattttattgagtttttcaattttttacattggcccaagtcgggaccggacaaatttattattttagagagtttattaatttaccgagtattaatttaaagagtttctactgtagttgcaagttgttacaatttaaattcaagttatagataattttgagtttgttattcctttgtactctatatatctcttgtatactcacaattagatatgaatgaaatcctaattattccattttctcaatatttattttatggtgtatatggctagcatttgataaagctcgcgtgattccttttttttttgtttattaaaatcccttgatgactgatgattcttctcaaaagcaatggtccaaagaatagtttacctgttacctgtatctaaagcacagaaatacatgagaaattctggtagtaatggtgtctaattaatgtttgatagtaatcagtaatgaagattattttttccaaacatcaatgcctcaatggtccataccataaatgtttatcaagtttttttgatagttatgaactttcttttcttttacattggctgttcagggccttgctcaacccttctctttcaagtttcaagtaagaattaggaacattgcacgaacacagggatagttagcaagtgttgagtagcaatattttgcatgtgaaaattggggatcacatcatagttgctcctaccacaattgcacattttaggttttttttaatctttcttacaaaataatggaggagattgagggggacgaaagcatatgaatcaaactaagtgaactagcatatagataattaaggtcacaatcgagcttaaaagaaaattctacaagatagctataatatcagtgatgctttgtatggtagtgaatgctggacatcaaagtgcagaagagatttgataagtacagtagagatgataagttgaggtggatgagcggatttgcaaagaaaggaaagataagatcaagaacaaagatatacaggaaagagttggagtagcaccaccgaggagaataaaaactcacttagaatggtttggtcatgtgagaagatcaacaaaggttccagcaagaaaactataatgcaatgaaaagggtagaggaaccattaaaaagacctcacactaaatggatttgtggaaaactgtttttgatatagctctctttatatttttttatccatgtaactaaccctacctagtggagtaagtgcattagtttctggttttgaccattcttccattgtatttttttatgttttttttattttatattccttaggaattgttttatttgtcactgggcacacattcttttttatttggtagggaatgactattgattgggtgtgctttctttttttggtagg

SEQ ID NO: 382 - DNA, 80 bp, Glycine max
  source 1..80: mol_type = genomic DNA
gtattttggttattgtctataattaatagagctcagtttaaagcatcatatgtatgattcggttttttaattttttcagg

SEQ ID NO: 383 - DNA, 97 bp, Glycine max
  source 1..97: mol_type = genomic DNA
gttagtccttcactgatctacacctttaaaaataatatatgtcatggagtgaggatgaaaaactactgatgggttctgacttgtcttgacatacagg

SEQ ID NO: 384 - DNA, 1200 bp, Glycine max
  source 1..1200: mol_type = genomic DNA
gtaagagacaatgatgttactgaatggtagttttgttcttattctgcagtagtatcaatatgaacaaagaacattgatctttctcttcgtttctgtataggtgtatatcaattgcttaccttttaagatattatatatggaagacctatgccgtagttgtcttgtttaattataccttacattcttactttttccaattatagtaggagaatgataggaatttggaattagagaacagataatggagatcaatctcctaacaagcagaggtagctctctgttgagacttgagactgaaatcaaagaaagaaaataatggggaattatgcagactcagagaatatccacccctcctaaaacctctcgacctttaaattcttgcctatttctttaaaattctcccctctcactttatccttacatccaaccctcttttttcctcactcaatgccgtacaatgcaatcagtctcagccagggttgttacagtccaaattcctctttagcccctgctcccttataccatcctcaatgtagtagtcatatactcgtataaagcctcatagagggcattagactttgctttagtagcaggataagggaaatttaactgcaaccaatggatcaaagcgaatgacacataataagattatacttttttatttcagttctggaatagaaagtcttacaattataacagttaacagcgagaaataaaatatcaggaggctttttacttattctgaaacattgttaaataaattagtaaactgtgtaccttaagttggggaataacaatctgaaagtttctttagtaaagattgtatatatatgttaacatgtctaaagattgttgttttcctgcttgaccattttaaactgggtttggtaataagaaattagacattggcaatgttccattccaaaaagtggaatgggttaagcagcattttgaatacatcggaggaggctgatatggataaaagttgaatttctactatttaagacaaacacagtggattgggtatttgggtggacctttaagcatatgagattaagaattcaattgaaaaaactgaaaaggggagagagaaatagttcacttttaaagttcaatatttgttattacttctaatatgtcccaataacatgccagacattgctgataagatgttttcttcattattccattgttttcagt

SEQ ID NO: 385 - DNA, 1429 bp, Glycine max
  source 1..1429: mol_type = genomic DNA
gtacatgatccatattatgattgattgtttgccaatttattatatttgactttaatgctgttttaggaatctgcattgatccaatttcttgtatgcaccactctgattatagataaatttgaaatgatgagattgtttgattaacaatgagcaaaaatcttgacaaataacctggtagtagagtcttctgattatgtaattgctatttttgtctattagtaatttttggttgtgtagccaactgcaaaagcaattatgtaggctatcatctctatattattactcaattgttagattgtgttttacaaaaatacaactaataattcgaaattgtacgagagtggctatgtgcgtgtgaggtactattgcttgcctaggtatttactaactaatatttcttcatctatgctctgcatattcgtaatatcttccattctgttttctatgtatctatgttgtcaatcgcggatgtcgcggccgctattgcggcggagcggagcggcgcggcccccatctgcgacggggatggacgtagtggcgcgggatctggaccggatttttgcgctgctacactgaagccgtggaaattccgaaaaccctagcgcgttgctgctctgcacacctgcgaggctgcgacaccccggcgaggctgcgacaccggcgagcgccaacacctcctccacgcccaggagcacgctgcgagcctgcgacactgttcgtacctttctttcccaaagtgagtgaaaaagtgagtggtgttgtgtggagcttgtaggttggtgtgaagtcgatgtcgcaggaaattagctggctgctactatgtatgcccacgagctaggttgaaaacatagggataagaaaggaaaaatagaaaagaaaagaaccacattttttaggtatatatgtaagtagggggaacatagggataagaaggaaaaatagaaaagaaccaaagagaaagtaacaatgtacgtgaagctaaacaatattaatatataataaattgtaggcaaacaatattaatatataataataatgttaataattaaataatatagaaataatattaaataaatataataatatcataattttataatattaaaaacttatatatatatatatatttctgtttttgaacatatatatatatatatatatatattattaattatttaacatatataaaaaaaaacattagaatagcggtcatcccgctatctgctatcccactatcccacttttggggtcggccgctccactccgctacgccggtattgacaactatgctatgtatgtgaatgccgcatacacacacatatcaaattaatttaagatctcattgaactcagcatttatatttgagttttggctaataccatgggtctttctgtctgctcatattttcttctatgtttacaacttaagg

SEQ ID NO: 386 - DNA, 102 bp, Glycine max
  source 1..102: mol_type = genomic DNA
gtgggtgacaaacattagtcattatttttatcagtgatcttctgaaataaaggtactgtgattttatctgcctgagatttccccccttttaattgccacaga

SEQ ID NO: 387 - DNA, 767 bp, Glycine max
  source 1..767: mol_type = genomic DNA
gtaagttcatcagaaaccctaatttctgatccgaatgttagagtgtgtgtgtgtttagttataataatttatttttgaagtaactagtgtttagtttcgtcatgcgaaaccgtagtttctgatctgattgttattgagtctcgatgtggtcgaggacctgcggtttctaaaattggtttagaataaaaatgattttagttcaaattaattttaaagtaactagtgtttagtttcatcatgtgaaagtgttgagtttgtgcgtggttgaggtttctaaaattgatatattttgaataaaaatgattttagttcaaattaatcttgaagtaggtgtgttaagtttacatcatgaattgattttgactgtagtcaaaacttgattttatatgcttggttattgcttgctaaattgtttatctcaaaattttggtataaatataatcactttacttcaaatcaatttaaccataattaatttttggaaatcaattttgtaatcattcatccatacacaatacatgcaatttatgtttttagatgtttttattctataaacgagttattagtgtaaattattttattcattgcaaacattacttatcttataattattttaattcaaaatcaattcaaaatcaaatccttaatgtaaaattagtcatgttaacatgtacttaaaattgtgttatagtaggtagtgcttcaaagtgattctgatgccaaacatggcgagatgatgtgtgaattgtgattgtttgtgttgcagt

SEQ ID NO: 388 - DNA, 344 bp, Glycine max
  source 1..344: mol_type = genomic DNA
ggtatatcaatttttatgggatcataggtttttctttttaacccatgttataaatgtgaaatatttacccatcttgttgatgattaatcttcgcagcaaatttagactttatttaagggatccgagtccagttccatctggatcaatataatgccggtgatcatggggggtttggtgtttaggatctgttaggatacaattttttttcttaattaattttttgatagacaaatgttagttttgttagcagagataatcgaatttgcgatcttttcccttaatcattcaacccaccttatatcccccttaatagtgtgttaatgttgttgggatttgtgtgatag

SEQ ID NO: 389 - DNA, 645 bp, Glycine max
  source 1..645: mol_type = genomic DNA
ggtaattgatcttcatccaccttcttgattttttgttttttggtttaacgtgaatgttgggattgtgaggtttgtagatatgatgtgaaactacttatctgtgtttgtcatgtaacttgatgattttttaagttatagatcatgggtttctctaaattgaaatggcttgcatgagcttcaaactaatccaaattgggcctatgtgtctttgcctatttaagtttaagcttttgggggttattggatcatgacatggtaccaaattgatccctgttgtttccattaataacaaacaatgtcttatcccactagctgagactaagctacatggatcacatgatgccattcctcttggataaaaaccgaagcttcagctacagggaatccttgttgtttccattattctaatatataaaagtaaaaagttcgatacaaagtaacccctggagcctaaaagggtttggaattgttgggtggttgtaaggaggaattcgtgggaatattttaaaagttaaactttttgttcattttgttatgtgtttgtatcatgaatgttgaatgagatttgaaggtctagtagccatttaatgacatggattggtattgaaatgagttgatgtgttttttctatggtgtttgttgtag

SEQ ID NO: 390 - DNA, 320 bp, Glycine max
  source 1..320: mol_type = genomic DNA
ggtaaactgcatgactataaattacatatgcctgaagctgttgaattttgaaatgttaatacagtacattaaataacttggtaatttgtatttcaatagcaagtagaaacttgaataaaataaacattataacaaaataggaggaaataacaaacatgatactcagctagatcaagggaatagaactagtctaaaatatatccttctttcgctgcgcttgttgggcgatagagtaagtatttgctgtattcaactcaaaaaattgatagtgacagtgtatttactgaggctcctttttatgttttctttcccatgtgtag

SEQ ID NO: 391 - DNA, 88 bp, Glycine max
  source 1..88: mol_type = genomic DNA
ggtactactcgtcatttcccaaactccatttattgaatcgcgtttcccaattttccataaaccaaaaaatcctcgtttgaattttcag

SEQ ID NO: 392 - DNA, 275 bp, Glycine max
  source 1..275: mol_type = genomic DNA
agtatgcactctatcttttttcgttttgttttttattgtgttttatgggacaataacttagccccttttgcttctcgagtggaaaaggggttattcttgttccctatattaatgtccatctatactttgtcaactgtgattgttactcacagttgattttcattgttggtacattctagctgtgttttatgaattttattttggcttggaaatattttattgataattacttgcttttacttatgtactgaagtgtgttggttttggtctattag

SEQ ID NO: 393 - DNA, 96 bp, Glycine max
  source 1..96: mol_type = genomic DNA
ggtccgtcctcagttaatgttggattttgtctttttttcttctaccgtttagtggtttaaatatgattgactttgaaaaatgttgctctcttgcag

SEQ ID NO: 394 - DNA, 86 bp, Glycine max
  source 1..86: mol_type = genomic DNA
ggtctcgcccctttcttaattctactcaatttccccgtctttgttacggaatggtttcaaatgattatttgctcaaaatgctgcag

SEQ ID NO: 395 - DNA, 898 bp, Glycine max
  source 1..898: mol_type = genomic DNA
ggtttcttactacttactagagcatttttttgtaattaatatttgtatgccattggttgactttgtgtctttgttacttccatgaaccctctcaatgcatagcaatcaactattgtaaacttatgtccctttttgttttaaagttacaacatcaattcttgcactttccaatgtaaatatatgatactgattaatttaggcttggatttcaatcacatttaatttaatggttcaaattcagtctagccaacttcgaacctaacagacactaactcatgctcatgccatgccatcacatggagaagtttttctacttttgtgcagtgccattgatgctccatttgtttggtgtttatacatacataaagagaaattttgaatgtgtgtgggtgtgcttttggacactccagatgtttgagtcaatgtagacacaactgacatcacaaaactagtgatgagtttttccccccattttatgatactgatgatgatcctgcaatgttgggcaacatgcagttgtaatctatgtctaattgtccataaatggctatggtatttattgaagcactaaatggaactagataattgtttaaagatatcatgtaaagtcacaggccaaacctctatatgtgcataagtttatttgttttctagaactagacatgcctaagatggtttgacactttcacctgatattgacaaacttctaatacttgagcagttctttgctgaacctgatttaggctttccaaatgactttacaaatgataatcctgacaagttgctccataggaatggttatcaacatttttgaagcataaaggaagatcttgatgggcaatatgcaataagtgataaagtcatagtttaactagtgtggttgttaatatcttgtcag

SEQ ID NO: 396 - DNA, 395 bp, Glycine max
  source 1..395: mol_type = genomic DNA
ggtgtcttcataacatctttgcattaaaacatcctataagtttcttcaatttcccctctttgtaattgagcatttgtttagtgggagtatctgaaaaagtaaaagattgctgaaatgattgactaaattttcacctgattcataatcttaatttcaactaaaacattatattgtacccttaagagagaaaattgaacagtattgcaccgtttagcgtatctcagactgaaattgcttataatacagtggttgggattcctatttgcctttgaaattgctatgtactagatgaaattttttggagatttctcaagtattgctaacctatgtagttttataattattattttttaatttctcttgtgtaataagtatatttccttacttctacgaag

SEQ ID NO: 397 - DNA, 260 bp, Glycine max
  source 1..260: mol_type = genomic DNA
ggtgagatcactatgtcatttttttcctaaaagaatgattttggagcatcgaagcttttccataaatttgtgtcttcacttgtgaagatttctgttggtaaattgttgaactggaaggtatcagcagggaaattatgaattcatctctctttcttcccccccattttaaacttctgtaatctgattgctatatgcacacattgctcaaaaatgtgatttttcttttaacacttgaaaattttgatgttatttccttgcag

SEQ ID NO: 398 - DNA, 76 bp, Glycine max
  source 1..76: mol_type = genomic DNA
ggtataatgactgcctaaacagataagcttcaaattgaatgcctttgtgctctactgacaggtatattcttggcag

SEQ ID NO: 399 - DNA, 464 bp, Glycine max
  source 1..464: mol_type = genomic DNA
ggtaattagaaatagttgtgcagtatttttgaaataggagacttgtctttgggacagcaagtgtattgctgtgtttgtgacataggagacttttttgtctctgggacagcaagtgtattgctttattttgtgatttcagtgttaaatattatcttttatttacttttatcaattggtgttctatcctgcagtcacataaaatctttagcacttctatactttgataaaaaaaaccttgaaaaattaaaagaagtatttcttttaacaaaaattaaattaaccttcctctgatactggtagcctttctagtttttttttactgtatttgtaatgttataaagttttcatcatgttgcagcttgcccaaattgacttgtgatagtgaaatatcatgcttttgtatgtaaatattttaacagctctactatactatgtcatgattttgtctttctatatggatttag

SEQ ID NO: 400 - DNA, 92 bp, Glycine max
  source 1..92: mol_type = genomic DNA
ggtctgcgttctgtggtagctggtgaatttgtctcctttgtattagttttaggactcaatctgatctttcttctttcctacacttctggtag

SEQ ID NO: 401 - DNA, 192 bp, Glycine max
  source 1..192: mol_type = genomic DNA
ggtagaactctccatttttctttcagtctttctttttatgcatatcttacttttctgctttttttatctgatggttatattggagatagatcagcacacacacacacacatattgattaaaatggtttttgttctgtggttaaaatcaagaaattgggttatgaaataacctattgttgctgcatttggtag

SEQ ID NO: 402 - DNA, 127 bp, Glycine max
  source 1..127: mol_type = genomic DNA
tgtaagtgtcacaatttcttatggataatctgatatccatctgcatctgttatatacttctttggcctgtagcatcttcatgtaatacttgtcatttcatgtgatgacatcaataaaaaatggacag

SEQ ID NO: 403 - DNA, 76 bp, Glycine max
  source 1..76: mol_type = genomic DNA
ggtagattctctacaaatcccacgtaccattttaagcacatctttcgtattgctaattttttgccgtcttatttag

SEQ ID NO: 404 - DNA, 1621 bp, Glycine max
  source 1..1621: mol_type = genomic DNA
gtatataaaatgcacatttcacatttcaaatatctgcatttaacctcgttcaatgctactgagccgtaatgcttgagcgacgatgaatctccagatctgtttcatttctgtgttgacatttctctctgttttttgaatatcgttgatctattcttcaaacggtggtttatttagcattataatagacgtttatggatctgcaaatttctcttggtcgcatggatgatagtgatatagatctggatagcggatttagaggttaaagataaacagagcataagatcctgtattctaattaaatccaaatggaagaatgagtatgctcaatttgattgtatatttgcttctaggagatccaatgtacatgttcaacgcaacctacataaacaaaagtgctgctagtttttgctccgttgttggatgcaacacctttaattgcctgtagactgtataaacacgcattcacattgtcatcaatttgtaactgtaggatgaagattggacgattcataatttctctataaaccagatttgaaatatgcgtttaagatctgagccattcaatcttcatccaaccgttttttatatgtagatctataatataataactaataagtcaaagaataattatagatctggagtagtatccatgtatcaggaatcgggattttctttatgtcatctttctgctgcaataattgctgtctcaaatctcaattattattattttcatttttttttcttgtttgacattatgcatctggattgcttgtttttagggagaaaatgacagggctgagatgttaaatgtggcccctgttgtctagaatgacgacaggcagggaccaccttatcttttatagtgcttaattaattaaataaaaatatataaaatctgtttattttgtagtaacattttcgcgtgatgatatttgactattgttttaaaatgataataataatccaacattgatattctcttcctatctttactatctcaaataagcaaagtttaattattttggtgtgttatatatatatatattggatttttttcgcttattctcaaaatagtgtactacatacatgaaagtgtgtacacaacttggaactttagttacagtagcaagtcactgtagtatattagtttaccccctgcatctgaattcaaaaattgatttggaaaatactttgcatactaaaacaatgcagattcgtgaaacagttttgtttaattttgctcaactataagttattattttgacagtgcttgcaatagtgatctaggagccacatagcactacatagtttccagataccgcttaatttggcttctattgggttgtgctatataactcaactgtgttcatggttccttcgcttagcagggctcagaacagaattcggttggtgtgctttcatggtcttgaaatgtgggctctatgagatcatgaatttaattcgaaatgcttccatgtggaatataatttttctcctgcttggttcctgctgcagtaaatctgattattgatagtttaataattatctcaaggttacactaacttgctttttttgtcatcttttattctgaaatctgaaagtttaatttaatttcctcagg

SEQ ID NO: 405 - DNA, 95 bp, Glycine max
  source 1..95: mol_type = genomic DNA
gtaagtattatcccctctgttgtacacaattgctctcagattaggcagatataaataataacatccgttgatttctctcatggattaattgtagt

SEQ ID NO: 406 - DNA, 3484 bp, Glycine max
  source 1..3484: mol_type = genomic DNA
ggttcgtttttgtgtttgagggagcagtttgcaaaattgaatttgtatgaatttcatcttgcaaaattggtcaaatgagtttgaacagccattgcatctttttccggaggtagtgttaaatacttctatgaaattttagtttttaccaagccgagtgacatcgagtgattcaaattgccggcctcacctactggataaggcttttgtttctacattgatgctagttaaaattgattttgaagtgaaatgatttatgtgtgggcattttagggtaaatggttactttcgtcctgagagtgggtgataatttagcccctaaaagaaccaaaaattgaatgtgtaaaaagtgtgacaagtacatccttgacgttcaaggaccaatttgacattactttgcaaagtttaaggactaatttgatattaagttgtatgacatgtaattgttacactttttacatattcggagactaaattaaaaattttgttttttcaagaactaaattgtcatcgttttacactttcatggactaaagtggccatttactgggtgttttattctaaaagcaacttaatagtaaaattcaatatttaatttttttatccaacgtaaaagctatccaaaattacttcaacttaattcatgttggacccaaaatcaattaagcaattgaacatttaagtaaaaacaccttaactagtacttcaattgatttttgacaactcaacataaaacgaaacacatactttaactgatttttggtgactcaacgtattagagtattataaggagctgcaattattcaattgcagactcacctaactactagtaaaagtcagtcagttagttagaagttagttagaagttagttcgatagtaactgttagactctttaacagaactgtctatatatactcctttgtaaacctcaatgacttgggttaattctctctctctattctcttagattaggaattctatgatggtatccagagcttagttgatcatcaatggagacaaactctgtttcttcttcttccgcttcagcttttctgagttcaatttcacagaaacttgatgatttgaatttcttgctatgacggcagcaaattgagcttgtcatcaaatcccacaaacttaaaaggtttgttgcgaatccacaaattctgttacggtttctcactgaagcagattgcgatgcagggattgagaatcctgcatgagacgtgggaacagcaggattaggttcttctcacctggttacagtcgactctgtctacatcgattttatctcgaatcattggttgcgtccattcgaatccacgattattttcacaaacagatacgagccaaagcaagatggcttcaaactgaattgtgtgcgacaatgcttgaagacaagtcgatgtgcgagtttctgcttagaatcaaagccatttccgactcacttgcctctgttggaagtccaatttctcttcaggaacacactgatgctttacttgaaggtcttccacaagattatcattcagtaatctcagttattgaaagtaaattccaacctcttcctattgaagaagttgaagtgctgcttttagctcacaaagcttgattgctgaagtttcgaagacacatctttgatttgccttagataaatcttactcaggtgaaccctaactcttctttgtcgtttggttccgatgcttatgcagcattgaacaaatcttcacaattgtatgattcggagacctttcgcggtagctttggtcattgatggaagttttaacagagacggcggttgtggtggtggtggcggcggttgtggccatggaggaggacgctttgcaaattttcaatgtcaagtgtgttacaaatatggacatacagcatctgtctgtcactatcggttgactagagttatcaactgaatctttcattcacactacatgatccttcaaatcaaggaaatgttcagaccaagtcctttggtcaaaatcagtattttcaaggaaactctaataactctggtcagaataactatggacaaaacaatggtttcagatcatcaaattcatggaatcaaggaactaatcagaatgcgtcaatgctgaacaaccaaagtcaacaacctccaagtgcaatgattgcaaactccaattttcagcttggtcctctacaacctggataccagatttaggtgcctcctttcatgtgacaggagaatcacaagaacattcagcaactcagtccttttgaaggtccagaccaaatctatattggcaatggacatggcttgcctattaattccactggttcttccacttttacctctcctattagtcctaaagtgtctttatccttgaatcagcttctacatgtgcctactataactaaaaatctaatcagtgtcagttaatttgcactagatgatggtgtattttttgaattccatcctaatcattgtcttgtgaaattatagggagtcaatgaggacttacttcaaggctcacttggacctgatgatttatatgtctttccaaatcttcaactccaaggctcaactgctgctagtttagcttcttgttttgtttcaaattctgtaactaatgccagttctgatgtaaataatctcaattctgatgtaaaaactacttttcaagtgcatgtactagcacaagttctcaaactctttggcaccttagattgggtcaccctagttctattgttgagacttgttcttaatcattgtaagataccaatttccaataaaaatgtgtttgagttttgtgcagcttgctgtgttggtaaatctcacagattacctgccactttatcttttttttttttggacagaaacctgccactttatctgaaactgtttataatcaacccttagaattgatatatggtattcgagaaagaaagagagaaaattagagagaaagaaaactgatattattgcaatctgaaaagttagttagagttagttaccttagaggtatatatagacctctgaccctctgaactaacactaacagaaactgatttcctaacactagaggggtgctgttagcaaaagctaacagcccttacaatcatattgcctgctgtctaacactagaggggtgctgttagcaaaagctaacagcccttacaatcattctacaaaactgttttcacagttatacaactgcagactcacctagctactagtaaaagtcagttagttagttagatagtaactgttagactttaacagaactgtctatatatactcctttgtaaacctcaatgacttgggttaatgaataacattttactcctttcatccttttctctctctattctcctagattaggaattctatgacagcataaaaccaaacacatattaactgttaggtatgttcatttttgttatgttactgtttgttgcttcattaggataatattgtggcctgagaaaaacatttcatgtttgtttttatag

SEQ ID NO: 407 - DNA, 84 bp, Glycine max
  source 1..84: mol_type = genomic DNA
tgtatttgcaagcgtttcttgttgtgtggctttcatttgtgtcagtgattttgatgttatgctttcactttgtgtgatccttag

SEQ ID NO: 408 - DNA, 151 bp, Glycine max
  source 1..151: mol_type = genomic DNA
ggtctgtcaatacaatgtgattttggttaattctttgcttgatgagtttcttaagtgactgtaaatgaggatcttagtcgatttattttttgctcattatgattagttgggtgttctcttatctgtaaaatgctgagaaaaaggtttgcag

SEQ ID NO: 409 - DNA, 106 bp, Glycine max
  source 1..106: mol_type = genomic DNA
ggtaactagctcagagcattgttgatggccttgtttgtagacatttgcatttgtcttaatttgaaacactcaattttagatgttatgtgtgtgtattttttgacag

SEQ ID NO: 410 - DNA, 125 bp, Glycine max
  source 1..125: mol_type = genomic DNA
tgtaagttttttgtttggatcactgcactttgtaccaagccatgattgtttttgcacttctgtgatctatcttgccctgtatagcatggtgtaaatgtttaattaattcattctaaatgctgtag

SEQ ID NO: 411 - DNA, 74 bp, Glycine max
  source 1..74: mol_type = genomic DNA
agtaaacatcttccctaaatagtttttcttccgagttgatattttgcataaaagaacttatggttcttctacag

SEQ ID NO: 412 - DNA, 96 bp, Glycine max
  source 1..96: mol_type = genomic DNA
ggtatggtttcaaatgattttattaggtttcagtttgggcttcggcctgggcttgggcttgggttttaatgttcttttttttttttttgtgttcag

SEQ ID NO: 413 - DNA, 385 bp, Glycine max
  source 1..385: mol_type = genomic DNA
ggtatacagtcaaacctttttcataaccgaattttcagtcgttaattttaaccgttacttaaacatagaaatggttaggtttaaatgcgtgattgaaatctgattttaataagattttaatgtgaagattttgggttacacactttatgaatgtgtgtgtattcgacttaaaaattcaaattcgaatgaatctggatttcatgtaatgtatttctccatgcattcccatagtttgtaattcgggtggcttactactaatatcgataaatctaaataaaacacattaaaatctgattgttacgatgaactgaatcttaatctgtttggaattggaatttcatttggtgtttgattttgtctaatttaaaatttaaaatttttgtag

SEQ ID NO: 414 - DNA, 1064 bp, Glycine max
  source 1..1064: mol_type = genomic DNA
cgtgagtattagtgttcttccttcgtcactctttcatggattctaattttgtgccttgatcggtgttaaatttggtggtgggttgtgcttgaaaatttgtatcttgatggatgttgctagtgaatttggtggattgtgattgacaaattgtgttttgatgggtgttgctagtgaatttggtggattgcggttgaaaatttgtgttttgatgggtggtgctagtttttgctgtgatggggcatgctcatggattgattgttgcttgtgagtttgatggattgtgtgttgatagagattggaattctgtgttttggtggttggtgaaagtggttattggtgtggtagtgactcaaattttttacctacacttgtgaatttgatggattatactgccagtgattggaattttgtgttttggtggttggtgtgctagtgattcaaattttgtgctttggtcagtcttgcatgtgaatatgatggattatgtagctagtgattgaaattttgtgttttgatgggtggtgcaagtgatgtgtgtttctttttgctatgatgggtctgatgtgctagtgatgattggtggttttagttatggttggtgttgcccttttttggtgttgtgtgccttgttgttttttatgggccgtgtgagtgattgttattttgtgctttgaatggtggtgcaagtgaatttgatggattgtattgactagtgattgaaatatgaaattttgtgctttgatgggtggttctagtgtttggtgttgtgtgctcgatttgatgggttttgcgagtgattgttattttgtgctttgaaatttgaacggtggtgcaagtgaatttgatggtttgtattgcctagtgattgaaattttgtgctttggtgggtggatctagtgattgatgttgtgtgctcaatatgatgggttatttatgtgattggtgtcgtgtgctcaatttgatgtgttgtgcatgtgattgatgttctatgctttggtggatcttagaagtgaacgtgattagtattctgtgattatgagtgtttttaattccctaaattacag

SEQ ID NO: 415 - DNA, 93 bp, Glycine max
  source 1..93: mol_type = genomic DNA
ggttagtcttgcaattttgttctgtgaacttatggttctcttgtgatgattagatttttttaaacttttctttttgtccattcttctctcaag

SEQ ID NO: 416 - DNA, 250 bp, Glycine max
  source 1..250: mol_type = genomic DNA
ggtaatgattttgattgggactagcactagggctgtgtttaattagaatgaaaatagttgatgacatggttgaaaattgctatttgtctactgtctagtttttgctgtgcttgcacattgtcattttgactttgaccaagtagagcctcaaaatagaagaaagcacttatgcagatactaggcattgctttttctgtttttcagtttccactcacttggctgcatcttttccctcctttttgatgggcag

SEQ ID NO: 417 - DNA, 499 bp, Glycine max
  source 1..499: mol_type = genomic DNA
ggtattgtgccattctgattctcccttcttgttgggtgaatggttacaactaactcttgataatcatttaagtgaattcaatccttattggtgtcttgtgttgcactttagcatatctatgtacatgtttagatgaattgtaccagggcaatcactttgttgagagggcagtattttcaatgattacttaattattatgacgagaaatgttcatacttatcatgaataaaggaggcataattgttttgttggaaatataacagcattttcaatgttgttcctcttcccaggtagcctagatactttgtatagctaggttcaatgcatcttaggaagtagtgataacttaattgctctcttttaaaatgtagttggcaatgattatctttgtaatacttgtaattataaatagatcattcagctgagtggtaattctcactcaggtacatacaaaaatgctttgtttctcattttctcacttgttttatgttgttggcag

SEQ ID NO: 418 - DNA, 844 bp, Glycine max
  source 1..844: mol_type = genomic DNA
ggtcagttacattttttgatatacttaagtggtgctactaagaaaagaaaaaggagtacattaagatttaagaactttatcacaattgttaaaataattttcagttttgacttcagctgtcatatttatttcatttctttgttgtacatagttgttctttgtttttttctgtatcagagaaaaaccacctttgtgactctggtatccctaaaatttggaactaatttgtttggaatgttccgttacagtcctatcattccatctgtcgttgtcagggatggataattggtctccaatccatgccctaaggcctaaaccattaaggtgatggcacaagctgtctcagaaatgtttgatcagctgccctctctctgagctttgtctctggggccttggcatgtgtcctaacaggcatcctatcctgtgaacatgtgtagcttaccctgtcatgttcccttgtttgccaccttcccatgattgtcaggatcccttgggctgcacttgtctattctgagatgctctctcactatttgtcaagtttgatgtgtttgggctgtttcttggtgttctttgtggtggtaatctctggtaattcattgttttggatcctgtatgacttttttccaatgagtacagcattgaggggaagagaagttgtattttggctggccttggtttttgtctcagaagcagtgtctgttctagatgtgttctggccacaatctttgtcctggatacagtctggacttgccatttccactcctataatttcaacgaataatacatagttctccttcctatatgattttcagctgtacaatgttgatctatttcctcatttcag

SEQ ID NO: 419 - DNA, 362 bp, Glycine max
  source 1..362: mol_type = genomic DNA
ggtaatacatatttatgcttccttgtttatttgacatgaatgttcctttgcattgaatatatacagaacttgtttcggctatgagtataatgagtcactggtaaagtaggattgtcgtatttagttctcctgctgaagttgtaagaaagtgagagcgccaaagcacttgattaagcgcagttgaattgttactctctgttaacttatgagtctagacattagagcaaagaaccttgtttacaacctttcaaatcattatctattgaatgtaattgtgcatggctttttgccttatgaattatgtatgcttctgttatttcttgttatttccatgtgtttattatctgtattgtaaaatgtag

SEQ ID NO: 420 - DNA, 240 bp, Glycine max
  source 1..240: mol_type = genomic DNA
agtatgctctctgtttctctttctcttgcctttttgtctttgtataattcttaaatttgttgcataaagtttctgtaattgttcttgaaatgtaaacagggttcacttgaagtcaataatgtttaaatgtcaccactttgttttgatacataaagtgttttttgaatgtcagaagcaaatgactatttgtctacttctttttcttctgatgtgattgtgacctgcattatcttttctcag

SEQ ID NO: 421 - DNA, 1930 bp, Glycine max
  source 1..1930: mol_type = genomic DNA
ggtattgatattcatctttgtggtctgaaatattcatctttgtcaatcagttatggtttggtagcacggtgcatctaagaggacagcattggaccctacattacttatgaaatatagtctacaaataaatatttacttcaatttcttatagctttctttggttggattagatcttggaatttaaaatatttgacattttttaacacctagctcattggattgataaagatatgatattctagtcttttccctttctttctctcttactccatgtctgttctccaaaagctgccttatatgtcctgattcctggtattagcatgctaatatttaattatttaccagtttttaaaaaatagttattaaggagttatatcattagatggtaggctttaagaacttggtcattgaagagcagacagggcatccaatctccttcagctagaggaagatatttctatctgatgataatgtgcaaaggtttaggtttaactttgccttgttggacagaattttcttcatttggttgttgtaggcatttgaaaattgaaattaatgatcatcctcataaaaagcttttcacacaatgaaaaggagaggatctttcttgtctctaatggctttaattctagaggcaaatttgtatcgaccaaacaattttttggcaattcaagaccttgtgttgtgtgagaaggacatcaaatagcctaggggagacattttaaataagccctatttttctttgcttatccaagaatttagcctactaagatttaaaatcattccggggcctctacctaagcttaaacatttaggagaattggttctagagatggaacgagtgtgtctatgacccaatgattaggagttcaatccttgttgccttcatttttcataattaaattagatttcagcaccaagtaaagtggatctgtatcttgtccttgcttctagcctaaggggctcttgtgtgagactgtgaggtgtgtatgtaaccaagtaatggcctcaaaactccagggggtggggtttaacaattttagcaaattttcacagacaacttttgcaaagatatatttttatgaaagagataaaacttttataaaagtgaatgaatggatgaatgattcagtgcacaaagaggtttagaatcaacctagagagcacatcaaataataaagttatacataagtaaaggagttaaggtcggtgggtctgtgcattatccatgcttcaagcctaaaaggacttgtgtggaggggcaagtcaaaaatataatataaaaaaattcatgtgtcttcacataatagcttaaatatttggaatagttgattcttgagtcattatagagccttgtaaactatatggtggagtcagctacttgaaccaagagcgggagctggaaaggtttagggtactcggttgttgtggttcaataattggaacagcatcttgtgcattaccaggtaagtaatacatgtaaatcggtacttgctgtcgaaaaacctatggtagataagattcatcttagatcaacctagcacggtatggttggcaaatagctatatcccttaagcatgtgatcttaggttagatctccaagttcttgtgtatataataacatttgttgggagaaattaactcattaaatgcatcttaataccttgagggattagtccttgactcttgactaggagataccttgggttcacaaataattaaaaaagattcatctgagagtaacatgggattttactatttgaacaaatccctcattatatctttccagttgtttttgtctttttttacccttttccctttttccactgaagtgtggtgggaatgattagtatccatcttgcagatttcttttacttaaatgtcttctcacagaagttgtttggtatttttttcgtttgcatggcaacag

SEQ ID NO: 422 - DNA, 2102 bp, Glycine max
  source 1..2102: mol_type = genomic DNA
tgtgagttcttttcttatttttttatttacagttctgacagattgatcatgcatatttgcttcaataatagaaatactctaccttgattttggccattcataaattagcacgtgataccattgcctaatttgatggatggctggtaaaagtgcatttaacttgaaaataaataaaattcatttttcttttattcctacctcccagtgaacttgggtgttccccatttgcattctataggttagtttgtcaatcataataattaaacaatcccttttttaggtagtctcaaaaagacaaaagtgaggaggtgttaggaaccaagaattgaaatgaggaagaaaataaaagattttattgactagtaagaaaaaaacagaaaataggagagaaaactctcctccaagggtttcccctttacaaaggatttctcctttcacaaagagctaatgctcaatctacaaatgataagatccccctctctcctatccgtcttcctctatttaaatccaataaacccctctaactaactaactcattagtagtctaactatattaactaactctttcttctccttatatcctaacaggaggttttgttaaaatgcgaataatgggaatgacttaaactatgataagtcatgcccattattgtctaacaataacaacaaaaataaataaatatgagatattcaatatagaagtgagaggaaaactataatatatttagcctctgtcttgctaataaatgtgtaactctcagaaatctgtctaaagttgactggaccaagattattaaatcgagattcgaatcatgaattttaagacctattttttaaattgtgaaccgaatcttatcataaatcataagatacatgatcaataattaaaaataacaaaatatactttcacataaagatattagtcaagtgaataacccaatgcataaactgaaacagaagctgatatatcatgaacgaacttcaaaataatcaaagattcaagtcataaatcaaaatgacaaaaaaaacagtgactagctgcagaaaattcaagtgttgaacccctaaaaaaaatcaaatgagatggcaaaatgcagattcctatttcccaattcctatgcttagattctagtacataatctaactatttgtgtctcatttatcattgtcaagatcaatgtcatttagttcatcctcatcttctgatataaaatgttcttcctcttcctttgctgccatttgttctttagttttattcatagcttaacagatgtaggatatggcaggttctgggtcatcatttacaaacattaaaaccttcacaaatggaatcacacagtttgagcaatattggatggatttctgaaatctaatgtaacataaaactatatttgtcacctgtactagcatccagaggaccaacttcttcaaaacattcttgactgtttgcctttggctttttgatcttctaacagcttcaaaaacatctctctaacttcatcaggaacaagcagcactaacattgtcctttgttgtgggaaggggatgcttcatccttggtcctcacaaccccaccttgacaactatgttaacaatacttggacttaactaaaagcctgtgtggaggagcactctcactgtggctccatgcgacatcggttttcttgggtttttacccattaccccactaaaaaattatgcaacagcaacagaaagtgaaaaggaacaacacaacctattagaaaaatagtggaaagggattggaacggtataaaggaagccactatggaggagacatgaagcaccaaaagcaatattcttacttgggttgggttcataagagcatccccaactcataagagcagccccaactcgtgtttcttccgatacagaagtgattcagcaaatggtttggtgtcaaaaacaagaattattatgatctatatcaaactctaaagattttgtaatgatcaatatgcaactctaactacactgcaagtcactggacataatgtggttactatattggttttttttccctttttgttagtttgttttatatattccgtgaaagcttgtgttgcactcattttttggtttag

SEQ ID NO: 423 - DNA, 129 bp, Glycine max
  source 1..129: mol_type = genomic DNA
ggtaaatattcttttttatttgtgacatgacattttatatctttgcgaaatgatgaaatgaaattaaacacctgtagtggggtaatggctacttctaattctactacttttgggaccattctggtacag

SEQ ID NO: 424 - DNA, 97 bp, Glycine max
  source 1..97: mol_type = genomic DNA
gttagtactttgcagtttcttctgttatgtgtaattgcatctattagtctcggtttcgttatcaaacgatttatttctataatgatctgtgtacagg

SEQ ID NO: 425 - DNA, 84 bp, Glycine max
  source 1..84: mol_type = genomic DNA
gtttgtatttgtatccatctgtttcaattcatagttttgtcatcacattgttctttccctgaatcaaatactttctgaaacagg

SEQ ID NO: 426 - DNA, 81 bp, Glycine max
  source 1..81: mol_type = genomic DNA
gtgattgttttgtttattgcaaattatctcttccacacgtgtaccaattagattgaactaaacatgttttggttttgcaga

SEQ ID NO: 427 - DNA, 95 bp, Glycine max
  source 1..95: mol_type = genomic DNA
gtacaaaatgcatactttttggtttgatgcttctcgagagaattgttttgcgttaacttttgcccttcattgaaattgcaatgtgtcttttcagg

SEQ ID NO: 428 - DNA, 243 bp, Glycine max
  source 1..243: mol_type = genomic DNA
gtaagatattcttgaacattatttgcttttgtgaggttcaggctgaagtttgagcttatctatagaatgagagtgtcattagacagcatgcacctggtttacaatggaatgattcttcattgtagaaaattgttttaaaacaatcagtgtcctcatcaaccaggaggtgctcatatgttgttttttttttgttctccatttcagttttccattatgatgatctatttttcttcttgttacagg

SEQ ID NO: 429 - DNA, 82 bp, Glycine max
  source 1..82: mol_type = genomic DNA
gtatgtttctgttctttaatatgattaatgaactattgctttgaatgcttgctaatgatacaaattatcgcttgagtgcaga

SEQ ID NO: 430 - DNA, 842 bp, Glycine max
  source 1..842: mol_type = genomic DNA
ggtctattttctcaaccctaaatctccgtactgtaatttttttaacctacatttttccgattcaatttgttcgcgttgttgagatgttaaatctggatccatttacgctgttagttctctttctgcatccgaaccttttcttcacttttttgttgtgtattatttgtgtttcgttctgtattgcttcagagatttgccgatctgtgtttgctttatgttttatgtgaacatttttttgcggtttagtttcgattgattctcagatgtacgtgtacgctgtgtattttgcgaacttttggatctggttatgtgttgttcgagtgatttggaatgtggatttgatgataacgccttgtttgtttaaattattttatttacagtttttgttgatatttatcattttatttcaaatggaccaaaaaccgagatgcatttctctaagtgttttgatgctgtttttcaactggaatttgagtttcgtcttagtaatttgtgtttattatgctgatttttgaaatgaaactctaattttaattggaaaataccctaaaaatactgagggaatctccgatttgcccatttcgaatccgtgttttattgttatgatggtctgtggatatggatgcagccaggatttgactctggtagtactttctggaggaaaaaccctgctttgtcattcaattaaaagttatttatcttttgattggaaatctgaatgtattctggttgaggaaaaacttttttcaactgtcacttttgagttttgaacacacggattctcttttcaagaagataaactacaaattctaatgtgatctatgttgtatgtgttgtttcag

SEQ ID NO: 431 - DNA, 102 bp, Glycine max
  source 1..102: mol_type = genomic DNA
agtaatgctgctcctctcctttcattgcttcgaatataactgcatttgcaattttactgtgttgaattgaatatcatactaagaaggttgtttttgattcag

SEQ ID NO: 432 - DNA, 97 bp, Glycine max
  source 1..97: mol_type = genomic DNA
ggtattgttattgtctgaattagaaattagaaataactagtgcttgtgttgagctgtataatatgccctttaattaacgttctgttgttttatttag

SEQ ID NO: 433 - DNA, 169 bp, Glycine max
  source 1..169: mol_type = genomic DNA
ggtctccacaattccattcatttcattttcagggatgctctcacttgtatacattattttcatcgtatcactgttctacgtgggatctccaacaattttgtgtttattttgtacatgattattgtgttcaactgtgatcatttgaatttcattgtgttggctattacag

SEQ ID NO: 434 - DNA, 769 bp, Glycine max
  source 1..769: mol_type = genomic DNA
tgtaagtttcggatttcttctgttattgttgttgttataattgttgttctgctactgtaggtggtcatgctgctgtgcttgatttttctgtagattaactgttaagcaatgattagtatagtgatgtcgttgacatttcaatttgccatatcattaggaataaatagtactgtatatgtttagggtccccacatatacttgacatctcttttgtttctgattcctgcaattttcttcatcacctgttttggtccttgccttaaacttaacagttaactacatgttttacatccctcttaaaaaaaaacactcgtgttatttttcgtccctgacaaaatataggaattttatttttagttcctacaaatatagtggtttttgtttttagactctgttgttattttctttcaaatatgactatttttgtttttagttcctagttcctactgtaacccaaacaaatgacagcgaatattgctgggataaaaagtgaaaaaaaaaaaaactacaaggattaaaaacaaaagcagcaatatttgcaaggacaaaaaattatatttaaccgatatcattatatttgtgggaggattctagtgagttttagtggtcatatagctggtggtcatggttgttgaaatacttgaatttattcaatcattgtggttcttggtccccttttctaaatggaatataagttgtattaaattttattttattctcatttagttgtgagttcaatttttcatttgttttttcttgtttgttgcag

SEQ ID NO: 435 - DNA, 191 bp, Glycine max
  source 1..191: mol_type = genomic DNA
ggtaccactttcctccatttctatcacccaattccctttctatgcattatgctattttttttctctgtcaatatgtggacaccatgtgtttgttgaaatgccccaatgcagttttcttagttttaggactagaattgtctgtaatattcattacccgaattcctgaatttggaagtgatgtttttttgcag

SEQ ID NO: 436 - DNA, 441 bp, Glycine max
  source 1..441: mol_type = genomic DNA
ggttggtaattggtacacagctagaaaaaaaattgggaattatgttgaatatagaattggatttggatgattatcttgaatgctttacatatttaatatgatctcagcagcaacacggttggtagttatctaaacacaaaatgcacattatcagcccctgcaatttgacacatttggatgctttcacttgaaaccaagagtgaaccatactgtagaatatgaactgttgtggttgttttgcattattacatgcgcatatgataatttatcagctcccccgattatgttgaatataaaatgtagaatatgaagttggttatgcataattttacttgaacttgataacagtaccataggagctatcaagatattttgtttcttattatatctattttattttaagaatattttcatttatggctgatctgaaatccttcatag

SEQ ID NO: 437 - DNA, 183 bp, Glycine max
  source 1..183: mol_type = genomic DNA
ggtaggaaatccttgtggtataaatttaaaagttattgtgctcttcttgttaatgttgaaggatctcacaaactaccatttacatagctagtgaaatcaattgtaataatccatatccaattgccaatctgcatttttccaagccagattcacaacctgttgtgttgacattgcttcatgcag

SEQ ID NO: 438 - DNA, 221 bp, Glycine max
  source 1..221: mol_type = genomic DNA
ggtggtctttagttcaatacttagttctttgacagaatcatttgaggagtttgtggtgtttctctgccaatagttttgttgcctctgccattagtatatcgagtgtcgataaattgtcactactttaatttgcttttcttttttgtgaatcaagggatgtaactaaagttatcttttaaacttgttaattttcctacataaccagactcattttctctcag

SEQ ID NO: 439 - DNA, 516 bp, Glycine max
  source 1..516: mol_type = genomic DNA
ggtttgttctatggctgctctttgaattttctctattatggataactgaatctttcttaggggacacctccggattgttctatggctacttgttttatacctatttttagtatgacttttttagtatgatctttctaagatcctgacttcctatcattaatatccagcttaacagaggggggttatacagaaaagtggtaaaaagtaaaagaggccgaagtactagcgtgggaaggggcaagggaggcttaagtacaagcaatgtagactggttggggtttgaatctaggatgaactgatcaagtagtctccatctctcagagtcttgataccgcttatctatgtatagctattagttccacttgatcttgttccctaaactactgaagaattaatgaaaatatagtagtgccttggtctaattgtggagctaatccatgggttcagtttgggtcataatgttaacaggatcagtcatattaacatatctgtatgctttccctatgatttctgcag

SEQ ID NO: 440 - DNA, 296 bp, Glycine max
  source 1..296: mol_type = genomic DNA
ggtgaagtacctttacttattaacgtgtatataattaagctccaagagtgcttttaaattttagttaaccaatttttattataaaattagtgattttcttaggccaaatgttaagcttggggcattttttgttgttggcctgatggaatacaatagtgtcaaatgttatatatataagtccacaatcccagccatgatatttaatttctgatcatataaatttcaagccctttagtttacatgttcttaatgattgaattcttcacctctttcctattttgtcttttttacttcag

SEQ ID NO: 441 - DNA, 305 bp, Glycine max
  source 1..305: mol_type = genomic DNA
agtaagagttaataggtacctttagatcatatttgcattgatgattctcttcctctcacacacagacagatactaaattctttataatttatataaaccttgcttgcactagtcgtatggactaaaccaatcaacagccaatacatcattatgttgtattaaataattgcataaatccttgtcatgtaattattttccattgaaattagtgatgtgttggttgttaattgtattttggaaggtctgactgctatatatttattgctttggcctggcatttacttttttatatttggaacctacag

SEQ ID NO: 442 - DNA, 457 bp, Glycine max
  source 1..457: mol_type = genomic DNA
ggtatgcatttctgacaatttttttttggggcgagggtgttaagaggttcagtgcttccaatgtggggctcaagttccataccttacaatttaatcttgacatcccaccttgctccacagccctggtcgcccatgcaggctggctgtcagtgtgatgtctgtagttggttgtcaatgcctctttatctggcattaataaccaggatttttgtacgctttgccatatgattaaacgaatttatgattgaatacatggtattgcttgccaagtttagaaatatagaacttgaccagtgcaaaatatgaccgagttttttttttccatccctgtggactgcaatgtgttttcttgtgataatgccattctccttgggagtgtccataatttgttaatgcttcttttaatccttccaataaatctcgatgcaagttttacaatatctggtccattgtgcag

SEQ ID NO: 443 - DNA, 580 bp, Glycine max
  source 1..580: mol_type = genomic DNA
ggtactactacttccttagttaattcaagttctaagtaaattgataaatttattgtccatacattcagacatgttattgttatgtccttttgcactaacaaaattttgatgctgttacttaactacttttcatgttgttctctaactagagtagtagtttcaccttagtttatatgtagttcctaaagtacttttcatgatgttctctaattagaatagtagttttacctcaataacatatattttatttcgtgaattaataaagtgaagttttaattctgattgaaagataacagaaaaagcaattaaagaaatatgtctaaatttgatctattttaaaggacaaagttttgctacaattctttaaatacttttttgttttgttcctcaatcaaaattagagttttacttggtaacgtaagttaatatttaattgaacctttattagggtaaaattctaattctgataggaaaacactaggaagaaaggaatgcattcaaattttgtcttttttataaagctgttgaattatttatggttttatgtatatgagaattgtctgtttgatgatcatgacag

SEQ ID NO: 444 - DNA, 1008 bp, Glycine max
  source 1..1008: mol_type = genomic DNA
tgtaagtattgtcaccccacatgatttattatctacaataaagtagtaaaccgcacatgaaatttcacattaatgaaatagccaatgaaaacgccagagtatgttggagcagagtactttaattggaatatctttttagggggggtaggtattagctatctctattttgatcggtaatatatatgttgagtttaatttggactaatttaaaaaattcaacaatcattttgttactaattgcaaaccgcatttcttgtgtgttaatttttcatcatcaataatgttttcttaacgtcatttttactttacactctcttatatactcagagagatgaaggagagaaaaaacaaagagaagtaaacagttttacagagggtgtaaaagagagtaacaagttaaaactgatgtgttagttcttctttcagtgctcaaaggtcaccaataaccaatttacaaaaagtaagaatcctgattttcgttactattttctttttttgtgtcgtgcaaaatggttttaaatttcaagtgtagttgtagacatggttgcattgcaatcaacaatatttcaagtaatgtaaaaaaaaaagtgtataagaaataaagcattcattcttggacaacaatgacacttataagggaaagagatgttgagtaggaagaaaatataaaaagaaatgatgaatgttaataaggtgcgtatgaaattacgaggtgtacgagaataatatataaccttttaaattaatcatcttgcagtaaggtttaatctcttcaagagtagtgaagtcaaagaatagatcctttctaattagatttgaatgaatgagtttgtttcacattgtttggcatatgaggggttaaacaccgatttttttttttagagtttctactcaacatcattggacttcactcaatccaacacacgtacaaaaaaaaatatgcattaattgttagatatgacatgcaaggagtaacgtacgtgtgcgtttttgttggtggcattgcag

SEQ ID NO: 445 - DNA, 92 bp, Glycine max
  source 1..92: mol_type = genomic DNA
ggtaagctttcaaatgattttattttcggcttcggcttcggcttcggcttgggttgtaatgcttctttttttcttcttttttttgtgttcag

SEQ ID NO: 446 - DNA, 466 bp, Glycine max
  source 1..466: mol_type = genomic DNA
ggtatatagtcaaaactttttttgaaacgaattttcagtcggttgattctaaccgttaaataaaacatcgaaatgattagattttaatgcttgattaaaattcaaatcatttggtcttcatgtgaaggttttgagtttctgatttcatgaatgtgtttggattgacttaataatttaaattcgaatgaacctggatttcatgtaatgaatttctccatgcattcccatagttataatttgggtgtcaaggagatctagctcaattgattgactaaggttcatgagttcttaaagctcttgatgctttcttctgtctttcatttctacgaataaaaaaaaaaggttaataattcgggggggcttaatatttattaatttttgataagtctaaatcttactaaaatctgatttgttacgatgactgaatctaatctgtttgattttttaaaaatttaaaaatttgcag

SEQ ID NO: 447 - DNA, 84 bp, Glycine max
  source 1..84: mol_type = genomic DNA
gtgagtatcaaaaccaattctccttctatttcttctgcttctgagatgtgagctcaattttctccctttggttgaatccacaga

SEQ ID NO: 448 - DNA, 300 bp, Glycine max
  source 1..300: mol_type = genomic DNA
gtaagtgttttctctactctttttacctttctaaagttttggatttgttgttgtgtttattgtttttctgatattgttttactatttatggggctatagagtaagaaatgttgttatgctctcagttaatggtaaagaagacactggcattttgctgtggtgataggctagtactgcttgatagtgtaattaggtgcttgtataaattttagttgattagaataatatctggagaaaatgtatgggtagtttgattgttgataatgaattggtggttgttttggcatatgcgaacttagg

SEQ ID NO: 449 - DNA, 107 bp, Glycine max
  source 1..107: mol_type = genomic DNA
gtaactcttttgtaagggttttcgtgattggacttggagtagtaatttacagatttttttgaaaataatgaataggtgtttctattttcttcttctgtgctgtcagg

SEQ ID NO: 450 - DNA, 1577 bp, Glycine max
  source 1..1577: mol_type = genomic DNA
gtcaatattgaattcctaatctgtctgttatatgtattgtaggattgttgttttccttttaccgtttgtttattttatgtcatatggttggcatttgataaagttcacgtggttccttttttgattaaaatcccttgatgattgatgattcttctcgaaagcaatggtccaaagaatagttgacctgttacctgtatctaaaactcagatacatgagaaattctggtattaatggtggctaattaatgcttgatgttaatgaacacacttttccaaacatccatggtccataccataaacatatctttacttttactttggcttttcaaggcctctctcaaccctgctctttcaagtaaggattcgagccgttgcttgaacacatggattgttagcaagtgtccagtagcaacattttggaggtgaaaattggggatcacatcataccaacgttgcagtgttgcacattttaggtattttggatctgtcttacaaaataatgtgggagattgagaggtatgaatgcatatggatttttttttttctcagcaaaaatagatatatattaaagtgaaatagtaccagaggtactagagatacaactattgaagtgagtatgtagctggttgcggtgaatacacaggcccaagctattacccctgtagctattacatgattataaaccacccctcccctgaatgcatatggattaaactgagtgaaccaaacacatagatacacattcgactgtatctataaaaaaaaagatacacatttgagcttataagaaaattctactaaatagctataagatcaatgatgctttgtatggtagtgaatgctggataacaaagtgcaaaagagaattaataggtatatcagagatgataatgtcaaggtggacgagtggatatgcaaagaaaggaaagataagatcaagaatataggaaagagttggagtagcaccactaaggagaagataacaaaaactcacttagagtggtttgtcatgtgagaagatcaacaacggctccagcaagaaaactggatcaaattgaagatagtgcaatgaaagggtagaggagccaataaaaataccttacactaaatggatttgttgaaattttttttgatatatctctctattttttatccatgtaactaatcctacctagtggaataagtgtatgtttggatggaattattttgaagatcataatctgattgatagaaaaaaagctgtttgtgttactaagcctgtatgttgaataactatcttagtgaattgtcactaaccaactaagtatcttagtgaactaagtcactaagacttaactacccgagactgcagttgaataactgcagctctcttacaatactccaataagcctgtatgttagtggtggtggttcttttcctattctggttttgaccatttttcaatttttaattttttttaactcatataccttgagaattattttatttgtcactgggcacacattatttttttttggtagggaatgcctattgattattgggcatgctttcttgtttttttttttttttttggtagg

SEQ ID NO: 451 - DNA, 100 bp, Glycine max
  source 1..100: mol_type = genomic DNA
gtattcttgttataatttgtagtctataactaatagagttcagtttaaagcatcagtatgcatgatttgctttttttattttttattttatttttgcagg

SEQ ID NO: 452 - DNA, 95 bp, Glycine max
  source 1..95: mol_type = genomic DNA
gttagtccttcactgacctatacctctaaaaataatatatgttatggagtgagaataaaactattgaaagtttattccttgtgctgagatacagg

SEQ ID NO: 453 - DNA, 432 bp, Glycine max
  source 1..432: mol_type = genomic DNA
gtaagagatcatgaggttactgaatggtagttttgttcttattctacggtagtatcaatataacaatgatattttttcttcatttctttattggtgtatatctattgcttacctcgtaagatattatatatggaagacctaagttgtattgtcttcttcctcttcaacccctgcccccttacactgtcctcaaagtagtagtcatatactcataaaaagccttgtagatggcattagactttgctttagtaaaaggataaggaagttttaagcatgagattgagaattcaattgagaaaattgaaaagggtagggagaaatagtacaacttttaaagttcaatatttgttctatatttattactactaatatgtcccgataatatgccagaagcattgctgatgttttcttcattattccattgttttcagt

SEQ ID NO: 454 - DNA, 682 bp, Glycine max
  source 1..682: mol_type = genomic DNA
gtattccttattaacgtatcaaataaaattcacttgttgttcatgtaatgaaattgatccatattttgattgaaatttcaatatagttttgttatccaatttaatatatttggttttactgcagttgataggaccatgcattgatctgatttcttgtatgcacctctctgatgatagataaacttgaaatggtgtgatgatttgattaactatgggaaatatatacattaattattaaaaatttaattgtatgaaaggacatcttgaaaaataacttggtgttaaagtcttccgtttatgtaattgctattttgtctttgtaataaatagatttttggttatgcaattgtatataggccatcatctatatatttttattcattcattaaattgtgttttactaaaatacatctaataattcaaaattgtatgagtggctatgtatattttaggcactactgcttggctaggtatttacaaactaatatttcatcatgtatgctctgcattttcataatgtctgccattccattttctatatatgtgcatgccgcatacatgcacacacatgtcaaattaataatttaagatctcattgtactcagcatttatattagagatttgactaatagtatgggtctttctgtctgctcatatcttctactatgtttacaacacaagg

SEQ ID NO: 455 - DNA, 102 bp, Glycine max
  source 1..102: mol_type = genomic DNA
gtgggtgacaaacattagctattttatttttcaataatcatctgaagcaaaggtgctgtgattttatgtgcctgagatttccccccttttacttgtcacaga

SEQ ID NO: 456 - DNA, 9433 bp, Glycine max
  source 1..9433: mol_type = genomic DNA
gtataatttgttttcattttaatgatctgtgactagtatttttatttccattttcttgcaatcattaaagtgtgaggaatcatacttgttttttttttcctgttgttttctttaaaatttgaacttgggctggttgaggttccatcccatgtgtatatgtactgtctgtgcctccagaacttcttcatttgtctcatctcttttaattgagtgtccttcttgaattgttttcagttatggatcaaattcgataaaatttgcatgtgccattatactgctgctagtgacatgagctgaacaatttagctcgtgtttattctactagaatgacataagttgtaaaagagttctaacagatcatagaagtgagatattttgagagaaaagtttagaatgaagaagtgaaaaatgagtattagcctctgaactgagttacaactcagtatttatagatctgagtgattagttatgaccaactaattcaccaactaacttactaacactcataacagaaaactaactcctaactaactggcttaattgagagtgtagttgaacactgcaactctttgtacaatactctaataccccccttcaaggtggatgagactttgaaggagtctcaagcacattgagtttggtccttagaaataaaaatctggttggagagaggggcttggtgagagcatctgcccactgatcaagagccagaatatgatgaacaaccagctgcttggacaagactttttctctaacaaagaagatgtcaatgtccatgtgcttggtccgagcatgaagaacaggattattggctatagcaactgctctctgattatgacagaagataatgggagtgatgaaaggaacttgtggctcagttaaaagggtctgaatccaagataattcagcagtagtttgagccaaactttgatattctgcctctgtactggaccttgcaacaacttgcttcttttgggaccaccaagaaatgagattaggaccaaagtagatggctgaaccagacgtggatcttctgtcttcactatcagaagcccaatcagcatcacagagagcacgaagaggataaggtttccccagagcagcaggtctaaggtgtaatccatgcaacattgtacctttcaagtatcttaggattctttttactgcagtccaaggagggtctaaaggattggccataaactgacaaactcttttaactgagtagctgatctcaggtctagtaatagttgagtactgtagggcaccctctacagatctatatagagtaggatcagaaaagaggtctgaacctgttttagtaagtttgcagctggaagcaataggggaggaaataggttgagcttctgacatagaagttttctgcaacaaatctctgatgtatttcctttgagtgagaagtaatgatctgtcacgaagagtcttaacctcaatccccaaaaaatagtctagcagaccaagttgtttgagagaaaactttgaattaagttgtgaagtcagatggtgaaccaagttagtgggactgccagttattataatatcatccacataaaccaaaagatacagtgtgagagtgttagggtattgaatatccctaacagcagagaaaacaagagaaacagaaaatagaagaatatacagaaaatactgggggcaaactgaatttattcaagaaggaaaccttcttccaaggaaaaccctttacaatttctaattcttctctaccccttcctctaatgagaatactcttatttataatatcctaatccaactaattgataaagatagaataataaagattagatgatagaataataaagataaagatagaataataaagatagatggccctaaagattaaactaataactaattcgatcctatctcccgtgtaggggctttcttccttctagaatagaccctccagataactggtctatcttgagatctaacaatactcccctccaaagaatgaaccttgtcctcaaggttaaattcaggaaatagattctgaatcacatccacattctcccacacagatttacttaaaactgaagtagctaaccctttgctgaaatatgcaactggacgtttcccttgtgttaacacagctccgatccctgttccgcaagcatcacattcaatggaaaaaggttccttaaagtttggtaaagtcaaaactggagagtgggttaatgcgtccttaagtgcattaaaggactcagttgccgctgcactccaattaaaagctcctttcttcaacaaatcactgagtggtttagcaatcttcccataatctttcacaaatttcctgtagtaaccagttaagcccaaaaatcccctcaaagctttaatggattttggtataggccaatgaaggactgcatctactttttttggatccatagagactccctctctcgaaatcagatgccctaaataatcgatggtggtcctgcccaaactgcatttcttgctgtttgcaaagaaattatgatgaaagagagtgtgtaggacctcactcaagtgctgtagatggctctcccaatcgctgctatatactaagatgtcatcaaagaagaccaacacaaatttccgtagaaagggctgcaacacagaattcatagctcgttggagagtggtaggggcgttggtgaggccaaaaggcatcacaagggactcataatgaccttgatgagtccgaaaggctgttttgggaacgtcttcttcactcattcgaatttggtgatagcccgacttcaaattgattttggaaaagtatgcagccccaaatagttcgtccagtaattcttcgatcacaggaatgggaaacttgtccggaattgtcgctttattcagtgctctatagtcaatacaaaaccgccaactgccatctttcttttttgctaaaattaccgggctagaatacgggctattgctgggccggattatgccttcctgtaacatttctgcaacctgtttctcgatctcattcttctgtaagtgtggatatcgataaggacagacatttataggacccgtcccatcttggaggacaatcttgtgatctacaagtctgtttggaggtaagcctatgggtttggaaaaaatcgcttgaaaacgctctgtcacatgttgtaattgggtcaactgaagatggtcaagtttttgctcctcaccttgagttgctccctcttgatctcggagcaggtctgaatagaaaagtatcatggcagcagcctcaacatctgaagccctcccaaagaccttcgctgaaaatcccttcttctgcatgctatagtctcccgtgatttgggtgggtgacccttgatagcgaaaagacatggtaagagtcttccaattgtgttgtacctcacctaatgaagccaaccaggtcatcccgaggatgacatccacaccaccaagatcaaacaagaaaaagtctccagtgtaaacataaccctgcatctttaggatcagattctgacaatatccctgagattcctgtcggtgtccatttcccagctgaaccccaaaacttctagtaggttgaatcggccagttcatccttgagattaggtcccttgctacaaagttgtgactagcgccgctatcaatcagaatggtaaccccaacaccagccatttctccccatagtttcatggtttttggaggcgtaatgttcctctggaccagttgagataattccatccattggcagtggtattgatcccccactacatcattggtctcctctggttcctgtttgtcattctcttctatgttgtcgccttcgtcctccccaaggatagtgatccgcagactcccttctggacacttatgtccaaaaccaaaggctaaaccacatctaaaacagcggccctcctcttttcgttttaaaaattcagcgtatggcaattgtctagctcccttgtttcttgaaaaggtgccaacactgccgaaatgcgggttatttgatccacacgaagaaaccccttttggagctgtcatgatgttccgtgctccagtagtagctgggcgtgcctgggatacgctataattgcctgctgtattggctgctgaactcgctgggttgctaatcacgacgcttcccttatgttgaaaacgcggaggaaaaaaaaccctttgagaaggaggctgaccacgagcaaggcggagttcttcatccacatctcttgcaatttccatggcacgcaagacctctgtcggccggaaagatcgcaccctacatcgaatctccggctggagaccgcccaagaagtatcccagcatctgttcttctgatggatcagggatttgagccaccaaaatttcgaattctctcaaataaacgtccacggactcctcctgtttgagagtttttaaacgctcgaaaacattgcccttactaccttcaccaaaacgctgaagcatgagtggggttaaagattgccaagaaagagatggattgcgttttcgaatgaaacgataccagtgtaccgcctccccttccatgctaatgaatgccaatcgaatcttctcttcttctttcacttgatgtacttcgaaaaaaatttcagctctagctatccaagacagaggatctgttccatcgaagaccggtagttccaccttcttggtccaaaagcgtggttcaaaaaccacctcagattcggtattgctctccgacttggtatcggaggggtctttctgtagtcgttccagctgctgcagtacgtgattcatgatgccttctaccctctggatgccgcctctgagatcagctatgtcttctccatgggtcatcaaggtgcggtctaaggtgtctatacgtgaatccatctggaatggtagaggaaagagcaggtcggaccaattgttagggtattgaatatccctaacagcagagaaaacaagagaaacagaaaatagaagaatatacggaaaatactgggggcaaactaaatttattcaagaaggaaaccttcttccaagggaaaaccctttacaatttcttattcttctctaccccttcctctaatgagaatactcttatttataatatcctaatccaactaattgataaagatagaataataaagataaagatagaataataaagattagatgatagaataataaagataaagatagaataataaagatagatggccctaaagattaaactaataactaatttgatcctatctcccgtgtaggggctttcttccttctagaatagaccctccagataactggtctatcttgagatctaacagagaggaagtcttgtaaacaaatagagatggatcacatttactagcaacaaatccaaactgaataaaagcagactgcaggctctcaaaccacggtcttggggcttgcttgagcccatacaaggctttatttagtttgcagatcagagaaggattggattgttggaaaccaggaggttgagtcatatagacagtctcattaagcaagccattaagaaagccattgttgacatctattagagtgtacatatgtacaactgttaaaacagtttagtaagagctgttagcttttgctaacagcacctccgtcttagctattaacagctgcactctctaagttcagagtcctataaatatctctttgtaactaactctgtgactaacttttgtgatactcaataatatgagattctctctttctgttacacaaaatttctctcaatttatcttagaacatctagctgagtcagcatccattaatttgtgattgctatagttaaagtaagcctaatagtgacaggtttcacaactggagaaaaggtttctgaaaaatcaaaaccttgtacttgattataacctttggcaaccagtcttgctttaaatatgttaatagagccatctgcattttccttgaccctaaaaacccattacaaccaatagcattcctgtttgatggaagaggtactagatctcaagtgtgattctttattaaagtttcatattccaattgcatggttgaatgccaattctccaaagagtggatttgcaaaccttgaccattgtctatgaatatctgattaggaccttcaaaaggctctagttgctgaatgttttgagattcaccagtaacatagaatgaagcaccagaatctagaatccaattggtagaattggattgaggttgagtgtttgtgaatagcactatgattggactgaggattgttactgacagatttgtaattggtattagtccaaacattagcaggtctagtatcaccagagttttggccagaactgttactattttgtgaataactggtgtagttatttgaagtttgagtggaagtggtctgagaataacttggactgagaggatcatgaagaacaaaggacaggtttggttgataatactgatcatagcggtaattgcaaacagaagcagtgtgaccaaatttgaaacacacctgactctggaagttggcaaaatgaccactgctgcggccgtgaccagcaccaccaccacggcagtgagaactaccactaccacggccagatccaccacaaaaagcgggaaaactcttcggatttgtcttgtttggcagagaaaaaccatcggagctgatcgcagaagacatatgatgtgcttgtgaataattgatgaaaggtgaatcagactgaaactgtttgctgaatttgttgagacgcgctttgtgagcaagaagagcttcaacttgctctatcggaagcggttcaaacttgttccagttcaacatggaatattacttcctatttcagcctcaatcctgatctatctcctcttgtttcagcctctacaccttcactttccccaataccttcctccaattccacttccagtcattctcaatcatccaatataatgtcgtctagtgaatctatacccactgcaccctctcccactcatcctcaatcatcaaatactatgtctcataatgaatctgtgtctgcatcaactcccattcccatcaacactcaccctatgcaaactaggtctaaatctggaatacacaatcctaggctgcatccttcattatttcttactcattctgaacctaaaagtgtaaagcaggccttggaaagttcagagtggtttgcaactatgcaggaggagtataatgctctaatgagaaacaaaacttgggattagttccattaccagctggtagacaagctattggatgcaagtgggtctttagaataaaagaaaatgctgacggttcaatcaataggtacaaagctagactagttgctaagggatttcatcaagttcatggctttgactttcatgaaatattttatcctgttgtaaaaccagttacaattagagtatttctaactcttgctctctcacaaggctgggacttatttcagcttgatgtcaacaatgcctttctaaatggattacttgaggagactgtctatatgactcaacctgcaggttttgaagttgaagaaaaatccttggtttgtaaacttaacaaggctctctatggattaaagcaagctccaaggcagtggcttgacagtaatacagattgggtttgtaggaagcaagtgtgatccctctttgttcatttatacacatcaacaacacactgtctacattctagtttatgtagatgatatcatcatcacaggaagttctaattctctcattcaacagttaacctcgagattgaatatagtcttctctctcaaacagctaggtcacttggactatttcttgggactggagattaagtatccccctaacaggtctattttgatgtctcaaagcaagtatgtcagagatctacttcataaaactcaaatggctgaggcacactctatctctactcctatggttacaaactgcaaactgtccaaacatggagctgatctatttcatgatccaactctctataggtcagtagtgggtgccctacagtatgccacccttactagacctgagattagttatgctgttaataaggtttgtcagtatatggctaatccattggattctcattgggctgtggtcaaaaggatattaagatatctcaagggtactatatttcatggtttattccttcaacctacttttgtttcaaaacctatggctctctatgctttctgtgatgctgattgggcatcagatattgatgacagacattccacgtcaggagcagctatctttcttggctcaaacttgatatcctggtggtccaggaagcaaaaagtcacggcaaggtccagcactgaagctgaaaatcgaagcttggctcaaacatctactgaattaacctggattcgaactcttctaacagaattacatgtttcttttcaaactcctgtgatttactgtgataatcaaagtgcagtgtccatagctcacaatccagtgttccatagtagaacaaaacatatggaaattggtgtcttttttgtaagagaacaagttttggccaaacaactctcagttgtgcatcttcctgccttagatcaatgggcagctgtcttaaccaagccactttcctcaataagatttgaagcactaagggacaaactcgatgtgaagcatttttctgtagaaaaaccttccccttgagtttgtggggggtattagaatgaatgtataaaaataactgattacaaacagttattgcaggacagttagacagctaactacttttctttcactaacagaattctgttaattagttgttagttagtttgtgattagtttcaagggctagaggtttataaatacctcctttgtaactgcattaaatgttaactttttcagaatcaataatatcagtttttcttttttttctgttctctctgttctctaattctgatacaactcagtatttatagatctgagtgattagttatgactaactaactcaccaactaacttactaactgactcataatagaaaacgaactcctaactaactgacttgattgagagtgcagttgaatactgcaagtctctgtacaatactctaataagctgaataatttacgtcgtgtttgttctacttgaattatgatatgtactaaatgcttgtgcaagttagcaaattaattttaaacttaaggtatcaaagagagaatggtattaacgtgttaggtatataattcaggatctgaaaaaacgaagatagagtgaggtgtagttatcttactttttttcagttacatatataaccttgcatccgttgttactttatttaacatttaaaataacttttagaatcttgggggcaaatgatagtgagccaaagtttagtttcttcatgtacctttctgtatgattttggttgtaactgcaattctacacataaatgattattatttctcattatcattttttttcttctgaatcctacaga

SEQ ID NO: 457 - DNA, 71 bp, Glycine max
  source 1..71: mol_type = genomic DNA
gtttgtgaatgaccatgcaatatctcaatttgttgcatttcatttatctgatgactgttcttcatgacaga

SEQ ID NO: 458 - DNA, 372 bp, Glycine max
  source 1..372: mol_type = genomic DNA
gtttgtttacctcctgttgtcacctcctataatgttttgaatcttactggtcttgtgcttttgtttgaatcttattgttcaagtcctagtttttatagtggcatacttttatttctgttgtcctccgttctctctgtatacttcttagataactagatatgtgacccgtcttgtgatgtgatttactaaacttgatctctgtgctttcactcaggtcataaatgatgtttttcaatcatctggtttagtgataaacttgtacaagtcttcagttagctctttatagctctagaagatgttttaccttctcggttccaataaaattgcagtttctctatattaaatttatttttttcccctttatttgacaga

SEQ ID NO: 459 - DNA, 199 bp, Glycine max
  source 1..199: mol_type = genomic DNA
gtaagttgatgttattcttgttcattgaaacagggaggaggatggaatgaataatgtttcatcttcaaaatatcttctttcatttcatctgctactatatgcacttcatagcctaattgtagcttctggtttttctgtaatttatatttatatatttattgtctgttgttttatgatgtgtttgtttttattatgcagg

SEQ ID NO: 460 - DNA, 1708 bp, Glycine max
  source 1..1708: mol_type = genomic DNA
gtgtgggacttgcattcaaagatgtgattagtttatcttgttcatttaatataaaagatttttgatattgcatgttcttagaaatacaccaaggcttcttgcaagagtaaaaggaaaaaggtgcccttaatgtactagtagggacttgtagtgccttgattgaggtgaggtctcaagagacatatgcctcattgaagattggtgttaataaacagacaaaccaaattcttggtgttccacccttttataccgtgaaagaagaaaaaacaatacaaattttatcattcaagatgtttctggtaaaaaattataaattttagtgatgttaattataaatataaaaactgttaaaaagcatgcaggttgtgatatgaaaaaaagtataaaggatatagatatatagaataaaaaccaaataaagctattgaagtgttttcagtgacaacatttgttggcaagtggatgtcctgatacaaaacacaccatgcagcaagtaaacagaaaacggcccagctagaaaataaaaataaagctgacaagtataattgcaaaatgtggcatggaatcgaaaattgaaaacaaatataggagtaaagcaaataaaccagacagatggagtgctggtgcttagatggtgtatacaataggaattattaaaagtgccaaatcttctaaagaaaacttattcagtggtgcttagatggtgtttacaataggaattattcagtggtgcaaacttaataaattcaatagtattaaattatcaccaaaagtgccaaatcttctaaaagagtagaagaacaaatgaaaaatgaaggcagttgtttgatttgactggcttatatatttcaccgtcatgttgcatgacttcaacaattgttgtatttagaaaaagctcctctaaagaaaatttttcgtttaagtgcacaaggatgcattcacctttagattttagtgggtaaggcaatgatgtaatctaaaattaaaagtagatacactctcactttataggagtcttttttctgaaagctgtcaatttttatggactggggtttgtcaattccactgctcattactagtcaggttcttgtatggaaccccttttcaaaagcaccatgaaggtgtgaaaagtgtacacaccacaaagagcaaaaagcactggattcttaccctgccttgtctgtggtgcccttttaggctttaactccactgggcaatccaagattatagggattatatagttgatatgtattgctatcaggttgagtttggtttagaaaaaggatcttggttgtcaaattgggatttgaattgtatgaaaggcatatttttcaaattgttgatctaaatatatggcaagtaataagattattgatcaatacttgaaacatcataatttttttcccacataataaaaaagtcaaataagtcagtatataactataatctgcaatataaacattaaagtaaatcatgattcaagtcataataagttaaatataataggacattggttgagaaaacaatattcctgttagaacatatagggcattacttgtttattacagcacatccaacttctggctggtccatctttttttgtgcttctattttattctgtagttctttaaattacttgagagacaaaatttcatttgttctatttctgtgtactaattttcttatttgtgtcaatgataattacagt

SEQ ID NO: 461 - DNA, 72 bp, Glycine max
  source 1..72: mol_type = genomic DNA
gtaatttaatttgatgtgaatctgttttaggcatctgacttgctgtttctgattgttttaccttcttgcagg

SEQ ID NO: 462 - DNA, 467 bp, Glycine max
  source 1..467: mol_type = genomic DNA
gtaaagttgatttatttttgccttctttctcttttactgtatacacacacaaatagttcttatgtagagcttaatttagtttaccatggacttttgtggtgtaaaagaagaaaaatttactggggcatccttttttatgtagactcttggaagttattttgagattgggttggggggggggggggggggggggtgagtggtgccaaagttgtagtttcatgttgttagtatgttacatatatcggaatttgatttttttatttattattatcttgattggaattgtatgagttgtattttcagtcaaatgacattttttcccaaaactttaaccaacagatattgatgaaaccatatgtacatattttttaggtttagtttgtgatcacttgatagtttttgaagcattttatatcaatatatcattacctggtaagttaaaattgatttcatttatcacatgcagc

SEQ ID NO: 463 - DNA, 665 bp, Glycine max
  source 1..665: mol_type = genomic DNA
gtatagtttaacaaatgaacccttgtctattttatccactgaatgacaatttggttgttggtgctgatttcaaatacctttgaagcttttgttgttttaacgtgttgtaatttcaagggtttttcttacaagtgaatttagttggtgtctcatcctaaatatcagagtagcttggttaattcctgctgtgttgactgccactaatacagccttgtgacttgtttcttatcttatgtgtagcagtgctagtgttattggagagatcttttgagctaatatatatttatttctctggttgcttttgggatgaaatcgtgtgatcttttaagttaattttctagtgaattacattaacaataacgaaacgttatataattgtaaagtacaatggtctgtttgtatgattgtgctcaaaatggatcataagcctttagccaaagcttctgcaggctggcacttctaatacaagaagataattaagttgaaaacatttatcaaaatctctctccggaatcaaatttgagtttataatattataaagatcaacacactggatttttttgaattaaatcatcaggtggcatgtgattgtccttgttcttcaagaagctggaaaggttaattgtagttgtaaaaattgactacaatttcatttctattgcagg

SEQ ID NO: 464 - DNA, 903 bp, Glycine max
  source 1..903: mol_type = genomic DNA
gtgcgttatctatcttatgtcgatgcacttattatggttttggtgtttgatgatgccatttccattgttgctgttttacttttctttcctggttatttcctgcaattgacaaatctggtttattataagttcaccatttctctctctctctctctctctctctgtatatatatatatatatgtttaggccttcgaaattgcacatatcagcatataacctatttggatatatatttgtggaaacagttcatgtgaacacgtatttttctgaatgtcaatttttatatgcaaatttacttttaatattttaaaaatggccaacaattcaatttcaataatggttatataattttggccttttaaagaaaaatgagaaactcaagaagcttgtgtaattgttttaaattctctgttctatcaattgataactctttaaaactctgatttgtctgcttatgtctgttttctggtgtctctggtatggtttattgaacttggaatttctgtaagctacaactctagacctttttcgttctgaaaccatttgggcagaagcaagagagaatgcatcataaatatgaaatgatagagatcctgttgatggaagttttgtaattgcatgaactcatgtgtgaatgatcacagttttgcaattcgtaccggataaagtataaaccatcttaaattgtttgaccagtgtcgtctgtttctgcctttacgtagatttagttttcttttaatactagtttttgggaaacccgctaagcttcgctctctcctttcccaacctctgattatgcttcaatttctctccaaaataagggggagactcagtaacattttaattggtgatgcactgtacatactgcgtcttctaactcaatgaatgactttatatgcagt

SEQ ID NO: 465 - DNA, 168 bp, Glycine max
  source 1..168: mol_type = genomic DNA
gtaattatctactgttcaccaaacttgtgattattagttcattaatgttaatatatatttcactttgcctatcttgtttcccccctttatcataaaagctaaactgccaaatagggctttcatcaaggataattttacactgaatcattttaatgcatttctgatagg

SEQ ID NO: 466 - DNA, 85 bp, Glycine max
  source 1..85: mol_type = genomic DNA
gtaagtgttctgttcactatgtctatgtatgccctctaatttctgattattttcgtttctgttgcaattttatttaatttggcag

SEQ ID NO: 467 - DNA, 88 bp, Glycine max
  source 1..88: mol_type = genomic DNA
gtaactctctctcattcgcctctttttaactgcattttattctttgtattgtaagagatatctggaacatacattgtcacatacttag

SEQ ID NO: 468 - DNA, 92 bp, Glycine max
  source 1..92: mol_type = genomic DNA
gtaacacttccaaatatctatctgctaggttaggctttaaattttaatctcatttcagttattttaaaattatttgttttgatgttgatcag

SEQ ID NO: 469 - DNA, 390 bp, Glycine max
  source 1..390: mol_type = genomic DNA
gttggttctcattactgaatctggctataataggatcatcattttcttttcttcttcttcttggtcataaacgggatcaccattttcttgatatagcatgtgcggttgtcaattgttaaggttcctacttcttaggaagctcatgatggttctttttatatgcagtggtcccaaaaattagtcaactactgtatagagagtaaaaagagaatactcatgtggtcgagatatcatgttgtttatgcaaacctctctttatgtttactaatttgtgttgtatgtatgatagtgttttccattcttgtgtcaaatatcattctcttaggagtttctgctaatttatttatctgtctatgctttatgctactattcactgtcattggttttcag

SEQ ID NO: 470 - DNA, 151 bp, Glycine max
  source 1..151: mol_type = genomic DNA
gtattctgtcaacaataaccccccctccttctcatttaagtttttgggttttaggctttttgctgtatacactattatattatttcatgtttgtttagtaataaagtttggttcaacttttagatttcattttctttttcctatgtatcag

SEQ ID NO: 471 - DNA, 139 bp, Glycine max
  source 1..139: mol_type = genomic DNA
gtaagttgtatgatctttactgctgggtccatatcttactatcaagttgcaacaaaagaattagtgataaaaaaatgtattttatattgatgccatgaatttgtgaactagttaatgaaggagtattttgtggcaccag

SEQ ID NO: 472 - DNA, 260 bp, Glycine max
  source 1..260: mol_type = genomic DNA
gtacgagactttgaagttgttgacaaacagtttggttctgtgttgatattaatgtgcaatacaattgccaaattgcgtacttatgaatttggtttggtagatatactgcaatacatttgtcttccttttctttccagcatgcaactaaatagttgttgtcactttactttttaatatttcatttattgattttagttgatatgctacattacaatactacatttttgacgagtagttttgttcattatttcaaaactcag

SEQ ID NO: 473 - DNA, 560 bp, Glycine max
  source 1..560: mol_type = genomic DNA
gtattgcttgctgtcctgtcaaagggaaataatatattagaggacttggtccattttttaagcatgcttattatatttagttttttaagactctaattttattattttgcttgcactactgttccaaaacatgcttcttcattaaaaattatcactagtgggttatggtttcaagtaagtcaatgatatatttcttaaagatatttaatatgacctgtgataaattatctgatctttctttgtaaaaaatataacataattaaattgtgaaataaagactaagtagtaaatataaaatttgtggaaagcactaatgtaaattggtgactttgaaacattggtatgcaagttcaatagtttcatttcatcacttcatggatgactccatatcaatatattaatatttcgttatctgtctgtggttgatgttttacattctgtttccttgatatataatttagaagaatttttattatattgtacttgtagccttgtgtttgtcgttaaggtttattcaagtttcctgtgtctgcttatgtctttacttatgtctacaatag

SEQ ID NO: 474 - DNA, 97 bp, Glycine max
  source 1..97: mol_type = genomic DNA
gtgagtgacatacattagctattttcttcttttttttcaagggtcatcttagtaaagtagctatatttatatttgctttatttgtttgttattgaag

SEQ ID NO: 475 - DNA, 549 bp, Glycine max
  source 1..549: mol_type = genomic DNA
gtatcttataatttcattgtaatttgcaactattgtcagtagtacctcctttttggctagttgagggtgtgggggaggtgggtgccaacatagttgggatgtatctcctttttcacgactgcttctatccttttcgggaaaaaaaagaacaaaacaaaaaaaactattgtcagtagtatatcttgtttcttcttattttgctcaatccttggtgctttttcccttgagtttttgaaaagtttgggatgtcgggtgtcaaccttggaatgctatgttccactgttcctcttgatcttgaactttattgatcaattagttgttcaaatttgataagaagggcactattggttgcggtacattgctgggatgataaatgtacatcctgtttgcttacttgcttgcttgctcatatctaattctaattctatgaaatcacaaatgttattcagtttcatgctgttacatttagcatgatttaaagaaatactgcagtcaaatgcacaaatggagagtgatctttgttacctctgttttttctgattcccacag

SEQ ID NO: 476 - DNA, 70 bp, Glycine max
  source 1..70: mol_type = genomic DNA
gtctgtattttgccctaaattttcttttcatgtcatgtctccattccatgctgactatttattgtgacag

SEQ ID NO: 477 - DNA, 817 bp, Glycine max
  source 1..817: mol_type = genomic DNA
gtttgtgtccctgatgtagtttcatataatgttgagtcttggtctagttcattatattctttatgggacatatacagacaaatgccttacctatggtggcacttttttattttattttatgcattgacatcttggatggtaatatcttgcttgaaaatcacatgttattccattcttcaatgattgatattaacatcgtaaaaaaaattgattgatattaactgttgctctattatcatattatttcataatgagtgaaagtttttctttttcttttaatttatgggagcggtgtatgagtttaattagattataataatttagcttttataacatattagggtaattattatataaatagtacactgatgtgattgcttgcaactgtagggtttaaacagcttacacagttctatcagaagttatacatacgttgacttgatttgtcatgtttcctttgacattatttgtggcagttgctctctactctatatttccatatagattagctcacttgctcatgatttttcaatgttttgatgtattgagggcattgtttaaggaagcaaaagtagaaaatattttttgaaaaagaagacatttattatatcataaaagtaatttaattttttaagtaattagaagcatttattaatgcatataaacttctctttaactagtgcccttagggatcatgttaatgggactcatattttataactcaatgatgcttttactttcctggttacattcaagttcattattatcagattccatatatgacatgatatccattattattacttttccattgcag

SEQ ID NO: 478 - DNA, 191 bp, Glycine max
  source 1..191: mol_type = genomic DNA
gtaagtccatctttacttgtattgaaatactgaggatttgttgaattatttgaatggtcttcaaaccaatcttcttccattcttgtctttgttatgttctgtgtatctacaaatatctttgtagatttgaggcatcttttttctggtttacttgcgataatcatttaactttgatgtcatggatgtcacag

SEQ ID NO: 479 - DNA, 127 bp, Glycine max
  source 1..127: mol_type = genomic DNA
gtatttgtattttgttcaataagtgtgattttttaatggtgttctgtgcttatactgttcagttcagtcaaaattccagtttgcatcctgttcctcacaaatttaactgctttaatgtaaatcacag

SEQ ID NO: 480 - DNA, 91 bp, Glycine max
  source 1..91: mol_type = genomic DNA
gtatttttttaatgtaaatttaaatgcattctttctacatattctagacttcaaattttcttctattgctcattattttggatatgtgcag

SEQ ID NO: 481 - DNA, 183 bp, Glycine max
  source 1..183: mol_type = genomic DNA
gtctcctcaattccattcatttcatttcattttttcttacaatttcactttatatagacatcgtttttttaaattgcggttgcagtgagccagaaaacctttacaatgcgtcgatgtggggtcttcaacaatttattgtttgcaattgtaatcgtttgaatttcattgtgttggttttgacag

SEQ ID NO: 482 - DNA, 817 bp, Glycine max
  source 1..817: mol_type = genomic DNA
gtaagtttcggatttctttgtttgaatttttgtaaaacttatggtgtcattgtagcggttattgttgttgttctgctactctaggtggtcatgctagtgtacttcatttttctgtagattaactgttaagtaatgattggtacagtgatgtcgttgacatttcaatttgccatttaagttagtaatttacgaaaacatatcattaggcctaacctatatatgttttgagtccctacatatgcttggcatttcttttgtttctgattcctgcaatcttcttcatcacctgttttggtccttgccttaaacttaacagttaactacattttttacaaatataggatttttgtttctgattcctgcaatgttcttcatccctcttaaaaaaaacactcttttgttattggtattttatgtccctggaaaaatatcggaattttatttgtagattctactgttattttcttttaaacatggctatttttggttttagttcctactgtaaccaaaacaattgacggcaaatattggagggataaaaagtgagaaaaatgctacaaggattaaaaataaaaaatactgcaatatttgcaagggcataatttaaaccggtatccttatatttgtaggattttagtgggtttaggccttatgtttcagtcatagctggtggttatggttgttgaatactagaatttattttattcagtcattttggcctttagtccccttttctaaatggaatataaattgtattatatttgattctcatttagttgagttcaatttttcatttgttttttcttgtttgttgcag

SEQ ID NO: 483 - DNA, 1593 bp, Glycine max
  source 1..1593: mol_type = genomic DNA
ggttctctctcttccttctctttaataagcgcttctaatctcatccagttagggtttaacgcgtttgcttttcaaaactcaaccggattaatggttggcgaattggttttggattttgttcagctgcttgtttttgtttatgacctcgttctttacttatgagttatgaatctaaaagaattgatagtaaatatgagacgtggtcgtggtcacagatgcatatggcttctgaatcacaacctgcaagagcctctaacaaaaaaaaataaatttcccaatcaagatgggcttcaaaccaattcaaaaccagttattttggtttttattctatgaactgggtttaaagtcagttcagagtggtttcagaaccagtttttaacctgtgatctggttttatgtgtgcaaaacccacaaaaacggtgcaagtagtctgtagctattctccaactctgaaagtataaactactacgcatacactataaaacagtatataaatgaagaaaaaaaactaaaaattcagcagatataaatacaaaaaacagtacatggtaacaatggattatattcctagaaaatatcacaagtttcattagtcactataaccaactataagaaaaaaatggggtggggtggggtgggggtatttctgcactacaaatataaatcaactagtttcctaggtggtcgttagtcgttacttataagtaactgtcagacatcaatcagccttttaaaacttattctttgacttctttctagtttctagccattcagttcataacaaaaactgtagtatactaaatacactatatagttatatacaaaccttcacattattcccctattgcatttatgtactttcgttgtttcatcagacaccttgcaaagctgcttcccttccctgttcatagttccttaattgaggttatgtactgcctactaggattatgttcatttatctcttttaaagctgtcagcactgctttatacgaggattacgtttctgtgaacatttagtcatttactattaaacaatgagtgttaccacagaaacattctaaatatctaaaacgaaggagtgtaaacagagtattttatttatgaagttggacagtttttcaattaaggtttcacagtctcaaaataaatgagttgtatttgttttaagcccgtgcaatgcatgagctgtacatttgttttaacgtaattaactcatggaaaatgaatataaatataacctatatgacatgaaatataaatatcatttttgtagcttaactattaacatttttattcaatgcttttatctttgtgtatcataaatagttagtctatgatgtatatactactagtactatgctttcattttaaaaaagttgtttacatgtatttagtaattaatcccatgatttgtataatgaaatgcttacatataaatatttattctatgatttagatattaatataattttacatggggtttttcattatatggcgaggcctgctgaattggagcttgatgtatcaatgatagcacttgccatatctgagttgcagcattaatttctaacaactggtggaatgtgtttttag

SEQ ID NO: 484 - DNA, 1493 bp, Glycine max
  source 1..1493: mol_type = genomic DNA
ggttttctcttttcttttactaattggacttggcagtctttgctaattcaattccacatgatttaactcttacatggaaatgtgcatgtcacttgttaactgcaaaaagcttgtgtttttttatcatatatttgcgtatttatcttcatctattattttgttacatgaacatagacaagttacatgcatcatcttgtagggccttttttttttatcagccaaaatatattatattataaatgaatgaaagtaccagaggtactataagtacaatattagtgctaggtatgctgctggatccactagtgtgaagatccagattgcagacctgatatattactacagtgaaatacccatcatttctatcctatatacaaaaagctactggtagattactagaccagtaggtatatgagtcaacaaaatctttctcaaaccctctaagccatgaccagattagaaatattgcatcttccagcagcttgcttccattaaaaggttcatttaggaagacatttcgatttctgtgctgccaaatagactaggttagggccacccaccagcacttccatctagaatactgctttccaccagcacttgcatcatcttgtagggccttaattgatgatcacatagcacaagtactagtgaactagagttatatgcaatcttgtcagtgaaaaaatgatagaaaatataaaaaaaatattgccttgttcttttttttttttttataaataaaattcaaatatagcgtaatttttgtgtgtctatattcttacaatatgatttctggatactagtgttaagtaggtctagatttttgaacttttccatgaagtagaagcttcttcaatcagcttatacagaggtcttgttttatttgggcttttgtacattcattggaagtatgaaattttggtgtgggatttatacagccttgggcatcaacgcttcaaggcatgatgagatgttagaatccaattccaaggtatctaattcaagtctcattggaattatgggattctagtgtgggtcttgtgaggactgggactcttcaactacaatgactagcttttgtgtgtggttctcccaaggttcttgccaagaacttctctaagattgtatttggcttggcttttccttttgcaataaagagaagcccaaaaaaagttaggctacaaacataccttagtctaggttagcatataatctaaaaaggtttggaatgcttatccacattcatgcataaatttatgcccgaattagaaaactactggtacgcattatttgcttgtcattgatatattaatctcatcaaattgtattgcatactcgaattgataatggagaatcttctgaagaattcctaattagtacagttgtatttgacttgcttgatattcaagagtagcaatgaattttgattttcatttgatgtatttattctagtggaatcattagaatcttacgactgttgcatcctgctgcag

SEQ ID NO: 485 - DNA, 116 bp, Glycine max
  source 1..116: mol_type = genomic DNA
gttagaacatgttttttccaattgatgagtgcttcttgtgctattgaagtagacagttcgctctgtgcttgcttaaatatgatattaatatatattttttctccaatgtttgcagg

SEQ ID NO: 486 - DNA, 250 bp, Glycine max
  source 1..250: mol_type = genomic DNA
gtttgtttctgtgattgatcttggatttaccaattttactatactgtggtcatgtgatttcaattggattgggccagttatttgaataaatgctgtatgttgactgagttctggtttgatttgaggcagtgttcaaggttatatgtggcacatatacatgagtgggatatacatgtatttccacattaattcctcacgaccagtattatttccttattttcttgtctttgttatgttggcattaaacagg

SEQ ID NO: 487 - DNA, 135 bp, Glycine max
  source 1..135: mol_type = genomic DNA
gtttgtactgatgttttttccccctcctattctcaacatcccccctcccacctcccccctttatgtgtacttacaagtaaaatgtattagtttatggaaagcattgagtgtttactttgttctcttatatgcaga

SEQ ID NO: 488 - DNA, 267 bp, Glycine max
  source 1..267: mol_type = genomic DNA
ggtataaattgaattagaataactatcttgaacgatagcgtttttatccgtcattagaataattatcttgaactagagtgtttttggctgtcattcttcaactgaatattttcatggattttttttttttatcaacgtttgttagttttttcgatctccgtgcaatgcataagttgaatctactggttgcttactaattttgattgattgattgattgttgtgattttgatggaatttgaataatggtggtgatgatgatgtggcag

SEQ ID NO: 489 - DNA, 935 bp, Glycine max
  source 1..935: mol_type = genomic DNA
tgtgagtttcgggtttctctttttgattggtgttttttgttattgttgttgttctgtttcttgcagattatggtttaattgtcaagtaaatggtggtctaattatctggttttgctttcaatttcacaatttaaactatgtttaaggttctgttagcttagatgagtaatgtttgtcactgtagtgattgtttatttagataaatttctctctaagaacttagagaagaaaataagaaggaaaaatgaaatatgcttttcccaaagctaaaattagcttatgcattagttaagtcaacttttaaaaactaaatgagacagctacaataacttaacttacacataagctaattttagctcatgggagaagtgtatttcattttgtcttgtatggttgtttatggagaagtttattcaaatagagctgaagtgtcattgtgttagtggggccagggggggattttgtgtcttggtagttgtggtgggtgttgttgttcagcttcttctatcaatttggttttcagtcactttctctaaatggaatgtgtggtcacttcatctgatgatatttttttgagatttttatgtaagatgttaaaaaaattattgttaagaaaattgagttttgtttgggaatgatattttaaaagtggttacaagaattttacttgaatgataaaatagaaacattttgaagtttaggtttttgtggttccttcacctaaaacaaattttactcccatcagaaaagctaaaaaaatatttagtttttaatcaattctactcattgcaggatttgattttgagaactccaaaaattacccggacaactgttgttagtttatgaataaattctttgggggccttaagcaaacatgacatcagttgtaagttcaattttttgaattaatttttttaatcttgttttgattacag

SEQ ID NO: 490 - DNA, 337 bp, Glycine max
  source 1..337: mol_type = genomic DNA
gtaatgtatatggattcatttttgtgttgttttgcttgttcatcttaaaggtattggttttggacaaaaaaaatgcatttccatagattttttagtgttgttctccaatcagaatttggagttttacctcatcaattcgtattaacattgatggaacctttattaggaggataactaagctgaaattctaattctgatccacgaacaacatcaaaagcacaatagaactgcatctaagttttgtcttttggtttttgatgatactagattttgacccgtgggatacaaagagagaactaattgggtgagtacttcaaattatgttcaattttgcagg

SEQ ID NO: 491 - DNA, 640 bp, Glycine max
  source 1..640: mol_type = genomic DNA
gtaaagattcttcaatgtctgtttttccttttcttggtttctggtaatttggggcatggtgcatggtacttgtatctttagtgttgtcaattgtcatgacacttgtattttattagaatctcaagatgattttcaaataatatagtttaaatgtccatatgaaattgtgcgtgctaatcaattgagtttcagtcttttattttaaacattttgtgggaattaataatgtcatacatttgaatggtaggtgttgggataccaacattgtttggatgtcaattacctattgtgatgcctttgcatgccatatcttcataaacaaaattgcgatacattctaagggagtttcaatacatattaaaattgatttttcggcatggtgcatggtatttggttagaatttcaagatgattttttaatgagtatattttaaatggccattatgaaattgtatatactaatcaatcaagtttgatttttttatttataaacattttgtgggaattaatagagtcatacattctgtttatttcaatactagtgcagattttcaagaatgttaagtgagaatgagatctgagggacaatgaaatgggttgaaaacgtagtttttaactgtttgaacatgctttcatgtagg

SEQ ID NO: 492 - DNA, 501 bp, Glycine max
  source 1..501: mol_type = genomic DNA
gtacatcacttggctttgataacatatgaatgaaatttgtgtggttttgtattgttgattctggaaactaatcagggaactctatttgaagaataagtaggcaccaataaaattaagggaaaagaaaaggaggagggaataaccaacataatactcagttattaaagggaaaggaaactggtttaaattaaaattgatgtgaaacaaatgtagtttgcagaggttgatagtgtatggtaattgtacaacctttttttagcttcccttcttaaaacaagaagcttctctaattaacttttgtgaaagctccttttgtgctttcttcactaaaaatttactattattttctagggtctttttagaattatttttggttcaacttctcctttttaagaaaagaaccaaaaagttgtgctaacactatcttagtactgatctgatgcttttttctgataacacttaaatgttttcctgataatttttttctttcctgagagcaga

SEQ ID NO: 493 - DNA, 307 bp, Glycine max
  source 1..307: mol_type = genomic DNA
gtttcctttcattctccctctattattactcttataactttaatctcataatttaattcaatttttcattctaattctcaactcaattatgcttgctactactctgccatgatactcttcttatcttactcttaaatacctttcattacagagataatttccacactcctttaatgcataattctaacccacttagctattctcaagtaaatgtttaaacttcacaaccgcacaatcatgccacctttttagtacctaactatctcagtcagaatccctaattttccctcttttcatatcactcaga

SEQ ID NO: 494 - DNA, 83 bp, Glycine max
  source 1..83: mol_type = genomic DNA
gtttctcaaacttgtctgatttcccttttttgtttaatggaattgccagtaatagcttaatattcgttttccacttttccagg

SEQ ID NO: 495 - DNA, 782 bp, Glycine max
  source 1..782: mol_type = genomic DNA
gtatccacacctgaatgctgtggtccatttctcgccattgtatataccttgtgcccttgtgtattctagataccattttttttgttgcaattttctttttgtcttgttatctgcatggctgagtggaaagaatcatgtgcttaggcacctatatgagataacatagattcctaggacagtttcacagttccaccaagccagttttttccttatgacttgttttcctcacggaatcaatttgaaagatgaaacaagttattttccacaattttctcttctgcagttaagtattaggagttacaatatttcaactttctcatgtaatcaagaataaattttgattttaaatgtagttggtaaatgcaatgaggaaaatattactcaaaatttattgaaaatagaacattaaattcttccaaagatgaataaatttcaattgctcttttaggggcaaagatatgttcaataatttaaaagtatcaattcatggtgtgaaaaatgatttttcctctgatattgtttttatcttcaatcatggtttgagatggccattataattgtgttccagtaaatattgcattctcaattggagtaaataaatagatgtctgagtatcttcaaatatgaaacatgttctgtagctaactggttgttatgtgcatcatgatctttttggtttgataactagatattgcaccggtaattgagggtgctgttcaccacattgcctcaagaagatttgagtttggaggtactgacctaactaatttcctggctctaga

SEQ ID NO: 496 - DNA, 669 bp, Glycine max
  source 1..669: mol_type = genomic DNA
gtctgctttctgaatttcaaagataggtttgactagtgatactaattgatagagggggaaggaaatatgggaatgaagaatcagtaaggagagaaaacaaggctttctttggattattatgattgattgatttaagcaaaacttatgagcaaaagtgaggaggtggctgatgtttgttactctggaatacattctgttttcaactttctgtgattagaatttaaaaatctgatctttgtagcttatcatgcagatttcttttattgtgttatatattttaattagctttttgaggaaatcctttgcaagttatctgcaagctcaaagtgttaaatgttgtatcagtaacttccatattccattaggaggggcagtgtaacagtatgactccataagtgcgtttgagctggatctctatttaatgagccagctgcattttttttagactgggctgacaaagaattgtctttcaaaattctggaccagcctgaagattatttcgtttccgagccaaactggctggtttgatgggataaaaactaccaaactcaccaagctttgtttccttcccccaagtgttaacgatatgtttttatattctaagttccataaatggatcttcaattcaataatttatgacttcatctgaaagttgaattatcttatagg

SEQ ID NO: 497 - DNA, 146 bp, Glycine max
  source 1..146: mol_type = genomic DNA
gtaaattttaatcttcagtagttctggtgagtttaggataatcctgacaagatggggattatctcacaacagttagatttcttacctaagccaatgctgttgctatgagtaaattctgacaggctaatgctgcttctcattgcagg

SEQ ID NO: 498 - DNA, 235 bp, Glycine max
  source 1..235: mol_type = genomic DNA
gtaatttggttatcttgagaagtaacttcaaattataacaacttaaatgttataataaataaatagctgtttttttctttcaatttggtagattttaaaatcaaaatttgatgagaggggaaaaagggtttttgcctcttttacatgaataacattaaaaactgcaaagatactatcattgttcttgtattaacttatgtttcaactggtggataaatctctggcttactgcagc

SEQ ID NO: 499 - DNA, 112 bp, Glycine max
  source 1..112: mol_type = genomic DNA
ggtacgaaatcaattctcaccccaaaatctcgttctccctttgcttctatttttcatttctcaacaaaaataaaagaaattgtgtccctaatttgggcttcttttgattcag

SEQ ID NO: 500 - DNA, 680 bp, Glycine max
  source 1..680: mol_type = genomic DNA
ggtttgagcttagaagtttatgcttttagttgtcattaaggaaatttactgatttaacaatgtcctgttttgatgaccctattttcagcttgtttaggcttatatgctgcaataagcacttgttaactattagccctgttttgggtgattttttctttggcatggttacgtattaaagtttatgaaaataatcttttgtggtagccagttctatgatagttactttgaatttactctgttgaattgtccaaactccactcctacattagcatttctcgaagttattcctattcagcttattttagggcacttatacgtatgacaacagagcttatttaacaagctttatttgaataagtatttatataccttttttatcctatagggtcttaatgtgtatttggactctctagtgtaggtgtgtttgcccatatactcatccatttgcctccctagttactcaataaatctttattatatactctttgacaattttggtgccatctttttttgtacatatcagtgtattatttacgttttacataataagctgtctatctgatataatcgatcagccaatccttgaaaacaaaattgggggtaacaagtttgtagtattctttaattaaactttttctttaacagtttccttaacagatgtatatattattgttttccag

SEQ ID NO: 501 - DNA, 2587 bp, Glycine max
  source 1..2587: mol_type = genomic DNA
ggtatgcatatctgaaagaatgggaattcaagatttgtttgatttgtataaataaatattacatataaaaatggtttatttgatttgcttgctgtacgtcaagttgtctaatttgaaaatgtgggtgtatatgttattctgtcacatattcatgtgatattcgtgcaccaaggacaaggactctatgggtgactagacacatgttgtagttaaatctctgtattgctggagtaaaataaaaataatgttaagttgctttatcatgtgtcagtgatcaaataaattgccagagactttgtccatcagctcttgaaagccaaaaagagtcgaagggatgcttaaaaattgactattgtttgcaattgcatattcattttaccttgcctattccacatgccatcattatctgcatagctaagtgaaaagaattggatggcttcatgcttgggctctgtatttgttagatgtaacctaggtttcttgtgttgatttattggtagttccagtaaatcagttttttcctaatcttctgttttactaattgaattgaatggcttagttgaatgtttgaattttcctgagagaagtcatatcagcctcatggatttattctcccagattgcttacaattcaatatctagttttagggataaataccactgcaagtgcatatttgttaacatattctattgattcaagataaataacaatctctccctaaagcttacatgtggtaaacataagcttgttactatataagttacccttggccccacagagagattgagtaaagctgtttgctcgttgatctttagaattcactaatgaggtagtaatctagggaaagattcttttctcagatgaaatgacagtctattgatatgcatagttcactcttgaaagacaggcttggaggcaacatgcaaggtttcttgattgttgttgaaaatcagaattaatatgctgattatattaataattgcagtttataggatcataatctctgatttagaggaaacataacatcctctatttatgtacaattaatgtaattaacctatataaacattcacccgctgtgtactctaatacggttttcagttcattatacctctgttttctcctattttaacaatggtatctagagcctgcagaggtattacgaaaatatatatatatatatatatatatatatatatatatatatatatatatatatatatatatatatatatatatatatatatatatatatatatatatatatatatatatatatatatatatatatatataaacagcattgctttggttgagtgtctgtccctgaaattatcctataactgaaaaataattaggataaggttttataaaaaaacctcaggacaacaaactaataataattctgaaaaaaaacagaacagaggacgacatttctgaaaacgggaatttcaccgctaacataaacaaacataataaacagaatgaagaagaacatttgaaaagaggagaaaaagagagaaaaacagttcaggaaaaaaagaaagaaataaaccagagtatgtcagagcagagaaggtcgctggagtgtttgcacagagggaaggttttgtgccgctagggtttgagtgagtgtgagaagagttttgtattcgtagaaggaagggttagtctaggagtaacagttgtgtttcgggtcgggttgtttcgattgggctagcccgagcccaaaaaattcgagagaaaaaacacagaaaacccgccatgcctgctgtgaaccgccatgagtccgcaacgttatggccatggtggatgcctttatataagctagaataacacataacagattgcggaggccgccgttacaccttcgtaatgccgttaaggcactgccataaccgccatgtgacaacagttttttggttgaactcaatttttatattttttatttattagtgggaataaattttcttgtaacaaactgagagcatagtaagcttcagcttggtggggtgtgtttaaaatcagaattaatattctgattctattaataattgctgtttataggaacataatctctgatttagaggaaacataatatcctctaagtacaattaatgtaattaacctatataaacatgcacccgctgtgtactttgacacggttttcactcaattatccctctgtttctcctattttaacaattgcaataaatcaatttcgaagagcctattttgcaaaacttcaattcttgaagtagtttcaacctatttcacttatggtattttctatttatcaaactaaatttacaatttacaaacacaatactattataattaagggtattgtctttgatttaaaactatctatacatggtagaaacttggaagactagttcctctcctgatatgtttggtttagatctttgtttgagatggccattacattgaagctctaacaaatattatatgtgctattatataagtggatgagtagatagatggctgagtgtttctctttcaaaacgaacttgctgttgagcttactagttatgcacaatttgatctttttggcttgcctaatcag

SEQ ID NO: 502 - DNA, 2050 bp, Glycine max
  source 1..2050: mol_type = genomic DNA
ggtacacctattggttcctctatcaaataattattacccaatgcttgctcatttacttgttcctgatatatttgaccagttcttctatcaagtttgttttactatagatctgacaatcttagtgtgagttaaaattggttaaacaaatggaaaacaaacaaaaatgaaagggagggtgggttgaagaattggtaatgagagcagtgctcactttagaatcacgtagagttttctttcactatgatgcaaatgaactggatattttgattgaatccctctttaagttctcttaaagctttgtgctagaaaatttattttccaataggaggctgtttagcggtacttttattaattgatgttgaaagcttgctaggttgtcattagaagcggctttagaatataaggccatattaactgggattttttttgcattcagaatgttagaattgattgagtatagttatttaggttctattttagttggttgaagtctgaatgtcttgcaagtcacaagtcacaacattgtttattgtatacatcaataagaggataggagattatcattgaatatgttaaattgaagattatttcaggtctaaatatatttctactttagatggccgtaatctaatatggatgcattgcatacattatatcttagttcatagagacttgaagggttctgagaaatttgttgacaccattcctattttccaaaggaaagatgtggtgaatgagacaggaaacatctaaatttgtgctttgagctagtgtacgaagttattggtttcctacttgttgaatgttatgatcatagaggtggtggaaaggccatgaacctttcacaagggtgggcatggtatggtttaaatgtaaaagctgagccaaactgaaattatctgaaaaaaggttccagttaagatttaaggcataacagttatccagtttattttggtttagttaactagtataacctataagatgtggatgcaattactttctctagtagttaatagtttgaacctcatcaatcaacaaaaatgcgtttgaacgtattaaaatgttgtgaaaacaccgttgcccttctattaccataaaaatacagttgatgtgttccatgtaaggctgaatggctgaacaaagatgcaaggttgaatagttgtgatcgacagtgatgcaatacaactcaagaaggcaaggaggaacaacaaccctgcatggctcaacaaaatgcaaggctgagcctctggctctgagtcaatgattgaaacttgtaacagttgaactgcagtgatggcggctttgaatggttgaacaatgatagtgggggctttgaattgaaccaaggtggtaggggcttcaaacagttgaatgtggcggtggtagcttttaataggaatgatggctttatgccacttagcagaagttttttgcactatgaataagagaagtctagaagagttcagagatagggccgttgagttaaatgtaggaagatatactgttggaaagccaccttaattgcagtcacccctaacctgtcttaattgtggtcaccccccaaagctcaccttagttatggcatattagagttggttgccaatgtcttggaaagagctactgttaggagccatgaatcagaatgggaaagaaaagatagattttattgaatagtaagaaaacataggagagaaaactctcctcccaagggtttccccttcacaaaggatttctcctttcacaaagagctaatgctcaattacaaatgatccaaagctgaatctcccctatccttcccttatttatatctaataaacccctctaactaactaaccaactaacttattaatagtctaactatgttaactaactttcccttctccttatatcctaacaatacacccctcctaaaaatcaaccttgtcctcaaggttggaatttgaaaactgaaatatgatactcaagcttttgctcaaacttgcctttgtttttaactggatcttctatattttatgacttgatctaaccttgattgttgaattatgtgtag

SEQ ID NO: 503 - DNA, 1539 bp, Glycine max
  source 1..1539: mol_type = genomic DNA
ggtaaaccgttatttcattagttctcatgaatctagtatatgggatcctttgttttttcattaatttgagtacaacagaactaaatattggactattatgttttctattgtcttcggtattaactaaacaaggtaaaatttggcaaggcaagagagagagagtgattgtcttcaggtgtgttatggctattttctaagacaagagtcacatatggcttctagagctcacaggaacaactacctagaagcaatatgatagggacttggggattatggggtgcctaagtccttcatcaagtagtatgggatgtttggtggagtaattaagtggctgggttctcccccctctacagctaacatttaagggagggttcccaaatgcttgggtgcttatcaattgttattagaggcttcaaccatgtctcttagctgcaaacaagtggtgcaggtggtgatgctggtattgcagtgttcgcctgggactagtcaaagggctagtgcacagccagccggcttgggtgttggggctgcggagtgtggtgggatgttaggatccaattgcaatccattggggcaagagctaacaagtgatttgggtagagcaggcaacaagctggaccacaagagttcagagttgggtaccgtgggagagctcaaaatctaatctcaaaccatggatcaagtaaccatacaaagccaataacatgaacttcagtagtagctctagttccttggcagtggtattagccaggggcaagacttcattaaagacatggagaacactcgtgactttgtccatattgtcattaaagtataatgattataatgtgttaatatatatatatatatatattaagtaaattacattaactacccaaaaggttttatgaaactacaaaaatttcccttgcttttatctactctacactactaactccccttaatttttgaaaaatgtaccctgacaccttgtacattacacaaccccccctataagggaggttactataaatgttaaaaaggtaggggtgtttgtgtttcatgaaaccccagaggtggtatatatatatatatatatatatatatatatatatatatatatatatatataatgctaactgttaaaatatcgaaatcttgtgtcttttcatcatgcaaaataaacattatatagaactaagggtattataataaaattcatttagtgctttctcgtactgatgtgtatcaaacaatgaacattgcaatttgttatgttgtgcgttcactaccaaatagtaggctgaacaaaccttgtcctgtgctgttctgcatgtattgttccttgatgtgcatcaatatactgtatactccactgttcagtgacttctttgcatttagttgcatatggaatttaggtttcctctgattaaccaggaaacctatgtttgttaagacatcaatttgttcagtatgttcatgacaagatgaggttatctcacagtaagctgatagctttttatgagaaagcttactcgtcaatgttggttcttacttcag

SEQ ID NO: 504 - DNA, 371 bp, Glycine max
  source 1..371: mol_type = genomic DNA
ggtaatcatgttgtcaagtaaataatgtaatacgcgtgtctgacagacattatatcattatatttatgttatcttggagtattttgctattgaaagaatttgttttattttgtggccattaatttttgaaatctggcgtgtatgataatgaaatatgggatcaaaatgcttgctgtccatggttttcttttattttgttattcagatgtttttttgttccccgagactctcccctgtttcctatctttgtggggatagagttgtgggctaatcgttataagagttcattgtcatcctatacttatgtatataaattattcatgtattaatttatgtttcctctgatgggccggtaatctgtcattttgcag

SEQ ID NO: 505 - DNA, 79 bp, Glycine max
  source 1..79: mol_type = genomic DNA
gtacaatttctctcttttaccgttaccttttcgacaattttgttctcatatcatattggggatgtcctcgtgtcacagg

SEQ ID NO: 506 - DNA, 113 bp, Glycine max
  source 1..113: mol_type = genomic DNA
gtatgcaaaaaatccaattttgttcactgcccattggccaccttcttcccaaaatctacaccaagcacttaagtattctaaatttgttgataccatacccattattactcagg

SEQ ID NO: 507 - DNA, 96 bp, Glycine max
  source 1..96: mol_type = genomic DNA
gtttttctgataacttgacaattttattttatactccattgcatgcatgtatgtgttgctttaattgttgttggtttttgtttttctgcatttaga

SEQ ID NO: 508 - DNA, 90 bp, Glycine max
  source 1..90: mol_type = genomic DNA
gtaagttatggcacactttgaagctgtaatttttatgttacagattgctaatattgattttttccctcttttgtttaaaaaaaaaaaaga

SEQ ID NO: 509 - DNA, 466 bp, Glycine max
  source 1..466: mol_type = genomic DNA
gtatgtggaatgtttattcagttacaattcaaatgaatgaactcataactgtttgtttgtatgatctgcttttgttgtttgttgtgttactgtaatttgtgttgtaataatgtttggacctgcctagactttctttggatctgtttaagcatgggattaatattcccctttcaaatcattgcatttcaagtagtgtgaaagctgtggaaattctgttgtgcttgatttgataaagattttgagttgaagataagtgatgaactgcagaagacaaacatgctgacagacaaatatattattcattaaagtaattgtaatttgattgacccttttgggcattctcacttttctacgaaggttacttgttattggtttttctaggattactatatggcaataaagcataagtgtaagtcactttttttcttaattaataccatgactttgaatgaacttgatgtgtaga

SEQ ID NO: 510 - DNA, 1366 bp, Glycine max
  source 1..1366: mol_type = genomic DNA
gtaagaggaaattggtactactcaaatgatgttttggaatgctttcttttgctaatcatactagaagaaatccacatactttttccttttggtgcactaattttttgaaatgtttataagtggttcccaccagcttattaagctgaggatttatttttcttatttggtttttcacatatgttatgttatatgattctaacattaatcctgtatgctccttgagttagtggttattgagaggttggtatcctctttctttcaatgaaggggacaggttctgattctgttgagtatgagcaaggaatttattgtgatggtgtagctgtttatttggattaggaccatggtgtaacaagatattggcatcttttaatgataagctgctttctgagtgttcctaaaaagagccattatgcgttcttttcctggtcaaaacttaccgagtctaggttgggtgcttcagttgtactgtagatctgtattaactgtgccctatttagatgtaagaaatgcatttaattaaatgttttagagctgcacaattttatggatctggaacctcatttgttctccgtattttttcttagtagttttatgtcttggtcaatggacttgttcctttatttgttatttcaaatcacagagtgaagggagaggtgcaagcctgctattaatttcaatatttgagcatttctttatgctttgtttccattaaatgtcatcaggaatttaggaattcaggacaggtataaaattttcacctgaaattatgtatctaagcacctcagattttcaacattctaagatgcatcattaatttactatacgtctacacctgtcttggagttggaatatggttagacaagttgctgaaaacctgcatgaactcttcacaaattttaacttgatggtcagatttatttttaaaaaaaattgatgctcacttgttttgttttgctgtcttctcaagttcaggctcttgagggaaccatctatgtgtatttcaaatgcatagacggccacactccctgtatctttctcaacttattgttgcccagaaagaaactaaaaaatgtctgtattgcaactagttctatagatcatctggctttttctgattgtgaaaaagaatatgttctgcataaatatgaatggggtgtgctgactctctaatctgagttcaatctatttgttctgtgaacaaacagaacgggtttagctttttggctctttgtgatccattataaacattgtagattcacttaagaggatatggcatttaattttgctttggtcttaaatgctgtgttattttaatattaattagcactatgttatgatttgtatacaaattggcacttgtaga

SEQ ID NO: 511 - DNA, 889 bp, Glycine max
  source 1..889: mol_type = genomic DNA
gtacttatcacttccaaactagaatactattggtgtaagttagtaattttatctagatgccgtatagctttttcctccatcacagcatcacctatgggcttctttgttttgcctgttgcatttttaggttagttatgcatttttaaaaaaaataaacaataagttttcttcataatggagaataatgcagaagtgctggatgatatgtttaattattaattaataaattgtagccattgtgatgtaactgaattgggagttaacatttgtattggtgatttagagatttatcgtcaataatttgggaaattatggtttagttgttttagtcattggatatctatcccctcttggaatatgtttttattttgttttctagattcggataacttgagtctaaagtttgggttgcttgtccaagtaatttagggtcctttgaattgcttatataaactattagaaatgggtctaataactcaaccctaaataaaagctagtacaaaggaagaggagtgcccaagccttacaaagtattatggccatattcctagctgatgtggaatatcttaacacatccccctcatgcccaagattgaatatttggaatgtgaagtttgccagactagacatctatgggtggcctaacatcaaagactggacagactttgatactatattagaaacaggttagatttaacttaactacaaaagctagctcaaggggaagggttgcccaacgcttataagaagttggggcatatttctagctaatgtagtatatctaaacataaaccatgtcttagaaataatgcaaaatagtgagaattttgagtgtctttgaattatttctagctctcattttatcactaccacttgcctattttgcagg

SEQ ID NO: 512 - DNA, 137 bp, Glycine max
  source 1..137: mol_type = genomic DNA
gtatttcgaaattagttcatttaaactgtgataaatacttgccatttatttattttgcatgttgtggttcttttagaattcttatttttcctctcttgatatagtcattttatgcttttgttcttgccacaagcaga

SEQ ID NO: 513 - DNA, 656 bp, Glycine max
  source 1..656: mol_type = genomic DNA
gtatgacctatcttgctgttgtaagtttatatgatgaatgctggtataaatgactattaatctgagatgatgaacatcatcattgactcatcatggttatggttgttttgttgctgctgtcgataatattttaacattacttctggggttatttcaaactcccttgactactatagatggatactggtatcattagaaagcctcattctcgaggagtgggttcagtccctcaagattggtatcaagcatgtttgttggtaatgaaaattgagggaactgaactaatatgtgtgaagcaaagcagttcttgcccttaatttgggtgatttcacggtcatagttttggttaatattttccaaatgaaaccgagtcttactgttggaagttgttaccgcagactttattcaaattttcctattctcaaaccttttgctcttgctttacaaatcctttgagctccaacagttgctatatctttaatctacatcagggatcatgatcctgatggatgatgaaatgtaattatagaatggggtgatggaaatcaaatactaaaacatttgatcaagaaggctttttatacatagaagggaattatttgtcaggatttctcaattagcttctaaagatttcatatggtattaatttgaccagg

SEQ ID NO: 514 - DNA, 1327 bp, Glycine max
  source 1..1327: mol_type = genomic DNA
gtaaatgaaactttgatgtattttattattattattcaacatatcttatttgacacttaatttggagttttctattacaatatcttggaagatggaataactgaatgatgtaacatttgcctgaacatgtatctaaaatttgtctttatggattaatagttctatgatctactactcttaacagcagaaatttggaagtagattaatgacagcgctctatgtagatcaacatatcactgtatgtttatccagcaccacctggtagtagattaatggcagcagaaaatgtatatgtgctccctgaactttacttcattttgaagtaaccaccctcaactttcagatttggtagtgtggaaaactttgttcagttattgttgtaccatcattagtaaggaaaataacatttacttattttttaaaaagtgggccttaaattttctaaaatcctacgaatgacactcttggtgataaattgatagcatgtttggtaatacgtcgattcaactcataggcatgtttagtctttatgtccacagacaagctactctgtttagtttttattttcatttttcagtaaaaaatgctagccagagtctcttagacgcagaaccaaacatatacttagttaaaaccaatcactaggttgctttcatgtgttgattaccttttctcactagggtagtgttttgccccatttttctgggctttcattctcctgaaaagtagaagctcctccaagtagcttttatagaagctctatttttgggattttgttcattaaaaaaagctactttatctttaagagcttttgtaaaattgtgcttagcccaacttcttttaaggaaaagattagcccagaaaatgttaggccaaacgctgcataggtggggttggctatggatcaaataaggctgcatgctgctatcttggattaataactatggttagagatataaaacaacaaaaataacaattttttcccactatgtgaggttgctataaatcttatgttggccatggtaatcataaattgttgattgtgatgtctgttttaatgatttaaacttttgaccagtcattggaattactttgccacttcagtaaaacaaatatggtaaaatagcttctactatgactttgccactagtaatattattctgaatatagttttgctatcgaccacatatatcaactttaagtattagcttgtgtctatttattaactgttcaattgagttctctccatacatgatggtagttcagattgatgtaaaaacagcaggtgactaattttggcatttaaattctgatcttgttgctcagg

SEQ ID NO: 515 - DNA, 921 bp, Glycine max
  source 1..921: mol_type = genomic DNA
gtacaaaatagtttcatacttctacccattactgatgttttaaatcattcaaaacttggaaaatttgcactaactgacatgcttgatatacctgttttttgtttttctgactcaagttttttctttactcaagtttagcaactatgtcattttcttttcacatatgtgactgtgacttgtgacatgtataaactaaactatattgatccaaacaaatggattaactgtgtagtatattggtcagaacaaaagtattttcttagaatttggtcttagagcacaactcaacctcacaaaaccggcttgtaaagtgaggactgcaaactttttaagctctatttaagtcatataagtcagtgtgggactaaacaccacccatgaggtgacaattaaggtaacccctaaagaggccacaactaaggtaggctagggttgaccgcaattaactaagctttccaacagtatttattccatgaagtattggttcaaacaaaagtcttcagcttgcctaggcattccaaaagacctaaatggtgggggaacaaattgaacaatgattaagagttatacattggatgaaagatttacaggtgtaagaacttgatttacaacaaatctgtattcccagtcaaagaaccacttacctaacattgacttgtataattccaattgttaaaaatattcagtagcacaccctctaaatcccgtgccccatgtaattaaagaaaattgtgcttatcaatgtgtactgattctccattatgtaatatgttgccattttggcattttcaatttgtttctttgtatcaagattttcatattatagttcttcgaattatgtagctgaccatattttctgtgttccaaattttgtggtactatttgatgtcattatttaaataacgacttcatactttcagg

SEQ ID NO: 516 - DNA, 1242 bp, Glycine max
  source 1..1242: mol_type = genomic DNA
gtgagttctactactttatctcattttgttgaaacactactttattttgcttgcatcctgttactgagtttgcagacatctccctgagtaatttagaactcaaacttattgagtgcaaactggattttttaatttgtaaattagttgcagcacatttgtgcccctgtagatatgtttatcttgtttctaaatatcatgaacaaggaaattttttaaagtactatttacaaatttcattcctttccactcatcattgggaacaaataatcttacagtttgaaggtgattttttgtatacaaatatctaaattcagattccaaacaactgtttaaatccatttgaatagattttgtcctattgcctacaaaaaacgttagtaacagtgactagtgagcctatttcagtcattcttaacacttttttttttatttgtttttgttgtagagtataatcattatttcaagaattcatataacacatagcttcagcttgaagaaaaaggaaaaaaggttttaaaaaatgttgggtgaaaaaggtttcccaaaaaagttggtttctcttctctctctcttcagtccatctcttttaagctaaaagaatgaaaactgtcaaggattatgtaagagtcaagattcggggttcattaattgaatatttgactttcttagagtctttttctaactcttattttattttttaaatctcttctaagtaaccaaaaaaaagctggaccaaatacctcctagcatgcaatactctttgatgtaagtaccagtgcacaatacttatcaattatattttatgtggagggtctacatagtctgtacactttgggtttgtggtgactttaaaatattacttggtaaattttcaaaataaaaatttcaaaagttttgaaaaattacacaataaaatttgaagaaaagctaacttataatgtttaaaatgatgtaaatattaaaaattgtaacataatttctgcttcaatttatttgttttttatttttttgtctctttaagttttattttttccaaatgagtttgcctgccctttaatgtttttatattctttataaccaccctttaatgtacaaataagccaaaacattggacgtgtctcatgagtcatgactttcaatatgcatctcatcatataaagctagtgctgctgctcctcttaagatttcgcttgcttccaaacttggattcattttttaattatctagtgtcctgtgtatagg

SEQ ID NO: 517 - DNA, 95 bp, Glycine max
  source 1..95: mol_type = genomic DNA
gtatgtatcctctgttgaattttcttcatttgccctcacatttttcctttgaacaatgctatatgactggaaagtgatgatgattattccacagg

SEQ ID NO: 518 - DNA, 90 bp, Glycine max
  source 1..90: mol_type = genomic DNA
gttagtggattcatgaattactttctgtgctgtaagcatgtttttgaacaattatatgtttacacaattctagtggtttccccttctagg

SEQ ID NO: 519 - DNA, 78 bp, Glycine max
  source 1..78: mol_type = genomic DNA
gtaattatgtcctttttttttcattctatacgcataaatttgaagccttgtttaactgcttggttctgtattcacagg

SEQ ID NO: 520 - DNA, 86 bp, Glycine max
  source 1..86: mol_type = genomic DNA
gtgagttttacatgttgagcttggtgtataattatcttaatattacatgttgatcggaaggaattgactcatttttctggaataga

SEQ ID NO: 521 - DNA, 780 bp, Glycine max
  source 1..780: mol_type = genomic DNA
gtttgtttcaattttgattcaccttatcatatatttgcaatgataattcatgtattgtttcatattaaagaaaagaaaaattagttgatgggatcaaactacattgataagaagatcttgggtttaattcttagtagtgcttattcatttgtaggtcatctgttggccctgaccttaaaatgctcacccccccccccgacnnnnnnnnnnnnnnnnnnnnnnnnnnnnnnnnnnnnnnnnnnnnnnnnnnnnnnnnnnnnnnnnnnnnnnnnnnnnnnnnnnnnnnnnnnnnnnnnnnnncactttgtacccaaaagaccaaaaaagaaactgaaatcaccagcatccttgttacttgttagtgtggcattgtagatgtattaagtagatcaataaattctgtccataattatgttacatattggcatgtaaacataatctcatttaatgacctgaagttttgacttcaacattaatgtaaattttcttgttttctttctttattatttataactttaatgttagatttgtcttcttcgtaatctattttttctttccttcatcctgtctgacattatcccatttttccttactttttctctaaaagaactgtacagttagcagtgcccatcatttatgcttttttgtttttcctcatcctgttttaatttgttctatttttcatgttgaatttcaacaccatagtgtaatgaatgattctgttaattatgtcatgatattaaactgatggatgaatccactattcttttgtgtctcaga

SEQ ID NO: 522 - DNA, 573 bp, Glycine max
  source 1..573: mol_type = genomic DNA
gttagtttcatatcctacaatctaatgattattttttaaccatttgtacttaaaaattatagatgtgtgcaaatctgctcccagtggcattgccggccattagcgcaccatataattgttgtaatgtggtgtgaataaattcatccacaaacattgataaaagataaaaaaaaaaaaatggactgaactagtggctttgatcggaaaaagaagtgaactagtcaggtgtccagttcattcaacccagcaaagaaccagtaaaaaattggccaaaccagtctaaaactagtgaaattggtggtaaaccttttttatttttaatttaacaaatatattttttagagactaaaagcataaaacaaatttattttaggaactagaagcatgtttaagccagtatttaattattgtggtttggccactattcaaccaaggtcaaaccatgaattgtaagtttcttttgcacattttacgtgaaagtaaaagcttttaccctactttttttttgttttccttgataaattacttttgactctgattttatgtactaccttttgtgcatgcctcttaagg

SEQ ID NO: 523 - DNA, 742 bp, Glycine max
  source 1..742: mol_type = genomic DNA
gtatgttgaatacttgtgactatcatgcttgacttcttcatgaatttcttcttgttggttattaaatggttcttattgtcactatatgttttcaattctgattgagaaatatatgttcatcgcattctggatgttaatgttgattcttctttcatgaacttggtggaaaatatgatgtcttaaattattgggaaaataatattgttaattattcagctttcaaagtcttaaaattcatgaatttaaggttgagagggaaacagagggcgagtttagccaaagcccaacaaataacatgttttagtagttgtttattgttttataatgtaaatcatcattattttttaaataaaaattatcaatcaatttcagattcaggtctactgttccagttgattttcatttgtgggatttggacctttaatattgaaaattttggtgcacaagttccacaattgtgggtccactgagatgttactttagatcattgtcaatttgttgattgcaaaagcagattgctgtgcatcaaggtagtacttgggttgggatgggatggcggtagcattgttgtgcaaagtcagatattaattaagatgttaaatgtgagggttggtagttagtggtcagatattttgttttaaaattttagacctccctgtttggaacttgatcatatataatgtcattgtctaatatatcattagtttttgctgtcttaacatggctgatatgcctttgcaga

SEQ ID NO: 524 - DNA, 546 bp, Glycine max
  source 1..546: mol_type = genomic DNA
ggtataacttactctaactccctgcgctatttttagggttcttgcgtttcagcgcttgttgtttcgatttgagtttgtttgttagtgttataagagttgtttgtatggttgagtgggaatcgatggtctctgtggtgtttaacttgtactgttgcaacgaagcagttaagctagagtgtttgtaggataagtcttgatctggaaaatcactcggtggattttgctggttttgaagtgtagtaatgtttacagttaattaattgcccaagttttgtgagacgttgttagcgttgttttccgctgttttgtatttgctgaaaagaaaattagcggaaatggttaggtgtgtatgctattatctatggtgttcgttagtttttaatttgtgatttgtgtgaagacatgcttgaaccatgagttaagaatggttgaattgaaccaattcctcgagtttgtgtgtaatactgaaatttttgtgctccgatgtttttttattggtaattgctaagtaattagggttctaaaaaaagtttgcgtgagtttcag

SEQ ID NO: 525 - DNA, 107 bp, Glycine max
  source 1..107: mol_type = genomic DNA
tgtgagttcatctcaccaattcttctattatatctttgcttgtgctgctctttcacctctttgatttgcttactgacattgtgattttgttgttgtttcttaaacag

SEQ ID NO: 526 - DNA, 570 bp, Glycine max
  source 1..570: mol_type = genomic DNA
ggtaagtcttcaatctcaagatattttgattcagatctgtgttgtcaaaggcttgttacctgcactttctttcttcatatttctattatttctcagatctaaagaactttgaacgttattttcaaaatttcagacgtttatgatttttctcttagattaatgcgtctttgaactcccacatgttggcattgtgctttaattcacgtgttttttccgtctgtcctgccagatctgttttgtttttgcactttctaaatcgtttatgcatgttgttgttcggatctatatgagtagctaggtaataaatttcattagatcgttctgatttaatcgttttattttgaggttaaattttatgtttgtgcttctagagttgtagatgttattttttctatatttttgaacaattaaaagtagtttctctaaaatcagtttacgatcaattacgtatgaactcatttctccttttattttcgctctattttataggcaacgtgaatttttaatgcgatttaaaaatatttatctatggaaagtggatgcttataatttgtttctatttctatgcag

SEQ ID NO: 527 - DNA, 99 bp, Glycine max
  source 1..99: mol_type = genomic DNA
agtaagtcacaccatttatcatactttatttcctaatgttgttagtaatataatttcatatacctaatgatatgttgtacttgtttggtgccttatcag

SEQ ID NO: 528 - DNA, 121 bp, Glycine max
  source 1..121: mol_type = genomic DNA
ggtaatgatatgcatatgttgatatatgtgattccttgtaatcattagtgattaatatcaactaacttgttatacttttctgtgtattaattaattggtgtttctttgttttggggttcag

SEQ ID NO: 529 - DNA, 402 bp, Glycine max
  source 1..402: mol_type = genomic DNA
gttcccaatttcaatacattcattcattattatctccatcccccttactagttactacatacttgcatgaatcttgaaccatttcacattcaacatatcactattgctcatcatttggccacaaaatccatatctgtttcggatattactaatcaaccaacgcataatatgacgttagttttttttttctttaactaatttataatttatgattcgaattctttgctgtttatgatcaatttagcgttcatctacgttgatctaacgttctgccattcgcaatatacagccataccttggtaaccatcttcagtttaaaaaaaataaaaatctatgagcatgctttgtagctaatttaaaaagagtccttggatgttgagcattactgtgttattttttagg

SEQ ID NO: 530 - DNA, 100 bp, Glycine max
  source 1..100: mol_type = genomic DNA
gtactgttttttccccatttcaaaaattgtgccttttctttgattgtgtaataagtaattaacagtttttttttttcttatggtgatctctcaattcagt

SEQ ID NO: 531 - DNA, 344 bp, Glycine max
  source 1..344: mol_type = genomic DNA
gtttgcgtttcttcaacacttataagttgaaacaaactctgcaatatcattttacgagtctaccatcaatttagtccttcaagtattaccctctttctcaaataatttttaaattaatgaaattatgtaagttgttcctaaagtattgattattgaatatctatcaattttgtcctatgttatattttactaatgtctaaggaccaatttgaaggatttttcaagacttgggagactatttaagacaaaagagtaaaactttagggatgaaaaaaaattgatggtttattatccggttttatgacatgtgatcgatatggcttctttatgatcatattttcagg

SEQ ID NO: 532 - DNA, 115 bp, Glycine max
  source 1..115: mol_type = genomic DNA
agtaagatagatatctggacggttttatttccaatatttttgttcctacagtgattagctagtacttttcaatttctattgatttaccgtgagtctactgtattgtaatgtttag

SEQ ID NO: 533 - DNA, 230 bp, Glycine max
  source 1..230: mol_type = genomic DNA
ggttagtcattacttcaagaaattattctgttccatctataagctacactctaaaattattaagctggttaattttaaactttcaatgctctgtggaggctcttattgtttttcccgtgacaatatcatacttaagttgtggttgaaaactctatatcttcctaatctaactagaagttttagaactgatttctctgtttctttcatgcttgttgaattaatttgtacag

SEQ ID NO: 534 - DNA, 329 bp, Glycine max
  source 1..329: mol_type = genomic DNA
ggtaaacgttttgctatgattctaattcatggatttaatttctttaaattgagcaaatgtgtaaagtaagaatgtaaaggtttatctgccatcaagtcaaaagttattgaagattacgagacattttaattgaaaccaaccgtagatatatatccttactttctcactgtacacttaaacctgatgataattgtatgaccgagagattatgcatgtgcctttctttcttttagttctagtttcgattcccagatcaattatccctatattgccagttgcatcatgtggtgttgggatactaatattaggacatcatgtttgaaatgcag

SEQ ID NO: 535 - DNA, 139 bp, Glycine max
  source 1..139: mol_type = genomic DNA
ggtacctcctcgaaccctaatttcgcctcaaaaaaaatcgaaacttttatttctggacttctctgtttttgaaatcagtttttgattatggggctgttgattttaacgttaaagtttgttccttttgatgaattgccag

SEQ ID NO: 536 - DNA, 352 bp, Glycine max
  source 1..352: mol_type = genomic DNA
ggtatcgtatattctacattttcaccatgttttcttgttcttctccatcttagtcactgtgccatgtatttgtttgtgtttatctgaaaatgtttccgtagtgaaactgtgtagttaatgctgatgttgttgtccccaattcttgttgtcatggtgcattttcattagtttattaactatattttaatttcgtaaaagaataaaataggaccgagatatatttattgttgtgagtgaatatagccttttatatctaagaggaaactgtttcatgagctgataaagccaacaaaaaggcaatttgccgcatgttgaataattatttttttttgaaaatttttttgtaccacag

SEQ ID NO: 537 - DNA, 1143 bp, Glycine max
  source 1..1143: mol_type = genomic DNA
tgtaagttttccctcattacaattttgtgagtaaaggagaggtggttttttttagtcgtttctatatgatcgttattatgcaattagaattcagttcctgatgatcataagctagtctgtgatttgtgttggttctgctgtgtgtgttatatgcatgtgaagttacacttctatttcaggaaattgtctatttgggtggctgcattttagaattagagattatacttgagtgagaacatatggtgttgccacttgtgttattgctatatgatacatttggattaatgatatgtctttgttgtttagttgttgatttgtccaaattgaacaccagaatgtgtagtaacttttaaggatttacattttcaactatttcaaaatgtttttggaataagtatccaaattccaaaatatagtctctttttctctgcatggattctatcttttgaatgttgctgatatggataaatattgtttaagaattcaaacatggccaaaaatcttgttttttgttgcctagagtatagacctcgtcatttcttcaaggtcctacagaatgataatttcctgggactatctcacagacagtgccatagtgtggtgccttgcaccaagcaatgccaaggtccttttcctagtatataataaatggaagaactattctcctagtatgaggcaatgtatgaattgatgtgtgacagtgaggtttgataggtccactagttggaaaggatgtgtactactctggacttaaatataaggaaaaaaagacacatttctcttggtctcaaatataaaaaaaattcaactaactttacctcatttaatgctactatatctaatatacccttcatttaattgagatcttagttccaatgactcttttttattccttatatcaagttccaatgaagggtaagttcaggaaaattcaatttttaattgagattggtgcaattaaatgtgattaactaactttcttagttagtgtgaatcaatttttttttttttatatttgagaccggagggaataccatattacatattatggaaatagatcatgcatgtatacaggtgtatgttttcattaattctgaaaaacatgtgaaggaaagccttactgacatcttctttcatctatag

SEQ ID NO: 538 - DNA, 251 bp, Glycine max
  source 1..251: mol_type = genomic DNA
ggtatgcccataagtggagtagtgattttcatttttctttcttgagcctttagttttttatcgccgttatgatgacattttaaactccaatagactactactactaattttcctatgctagtaaacttagtggtctgtagttacctaggagttccttggtttgatgaatacagattcttctcttttggaacttctacaattaaaattatttaactcactcttttctatctttatgtttaatgtcagagcag

SEQ ID NO: 539 - DNA, 286 bp, Glycine max
  source 1..286: mol_type = genomic DNA
ggtactaatactttactaatcctataaaaaagaaaaattaagcacgtcatcttcttcaagtggcattagtaggaactgtagtgttgacttgcctatagtcttatgcccaatcttgtccaccaggctattcataaaaggaaagccaatttctaagaccatgacatcttggcacatagttgtcactagtttggacctcaacatgggcacatgtttatctctattcaatgctagatgttgtgcacataattttattgacaatgctatctatgctgctctgtcttggcag

SEQ ID NO: 540 - DNA, 198 bp, Glycine max
  source 1..198: mol_type = genomic DNA
ggtatgctttttttgttatttacttctaaggatcttttatccaaaggaaaataatttttttcatttctgtttgtcctcacatgcattttcagatttgtagatcacaaatcattgctggtaggatttacatagccttatcaagtgtataaagtattataattctttataatcattttttttatttttttatatttccag

SEQ ID NO: 541 - DNA, 90 bp, Glycine max
  source 1..90: mol_type = genomic DNA
tgtgagtaaagagtcatcctggctttgctatcgtcaatctgattgcttaatacatattatttcgtagattttattatattctcaatgcag

SEQ ID NO: 542 - DNA, 85 bp, Glycine max
  source 1..85: mol_type = genomic DNA
ggtaagaaaaggttcttctttttaatcttaagttcatacaccatttctatttttctacaattttacttcattaatggtttgacag

SEQ ID NO: 543 - DNA, 194 bp, Glycine max
  source 1..194: mol_type = genomic DNA
ggtcagttttagcatacctcatgcatcattagattgaacttgctgtcgtcttcccccttcaaatgtacttgtaatcataaatttcttgcttgttcccatatttgctttcggtctttaatattccaaataatttctctgcatgttgctctctgtgccttatgaagttgacaatgtttggtgtgctctgttgatag

SEQ ID NO: 544 - DNA, 317 bp, Glycine max
  source 1..317: mol_type = genomic DNA
tgtatgtttcatgctttaatttattcagtttaattgaaatcactttgttgcatatttatgtgagttaagagctcatcatttcaacctagtaaaacagggaaaaatgaggaagcaagagcattcactttctgtctaatttaaggttaccaaatgccttagcagggagaaaagttcatactatactattataccttagttaatgttaggacatgacatttgtacaaagcatgactaatcttgacaaggcttgaatacttataaattatactctattatgctttaaaataattctgattgtctttttgcccttattgtag

SEQ ID NO: 545 - DNA, 503 bp, Glycine max
  source 1..503: mol_type = genomic DNA
ggttagctttatgtctttcatctgttactccctccatccctaaatataacttttttaactaatttacacccttgaagaaagttggttaatatagttggtagtattaaatttgttaacaatttgtattattttgcctttattaccctaaagtttattggaactataatctctctctttccacttaattgcttcacgcctaattaattaatgagttagtcttcttattcaatccttataagagagataatatatttatcttttaaatatataacatttattgtaaaataataaatgatatttgagtcaaaaaataattaatgcaaaagacagcttgaaaagagtcttataaaaagtgacaaataaaaactgaaaaaatagtcttatatttaaggacagagggagtaataattatgatttgtggatgcagtctccatttgaatggttgtgttacatataggctcttgatgactcacaaatcttgctggattgttgctttgctgtag

SEQ ID NO: 546 - DNA, 300 bp, Glycine max
  source 1..300: mol_type = genomic DNA
ggtttcctttcattctctctctatcattactgttataactttaatctcataatttaattcaactcaactatacttctctgccatgatgctcttcttacatacctttcattacaggcccgcacttggagaggttttatctccttcaatgcataattctaagtttctaacccacttagctattctcaagtattactttggacttcacaaccgcacaatcatatcaccactttagtacctacctatacctaactatctatctctgtcagaatccctaattgaccttctttccattggactcag

SEQ ID NO: 547 - DNA, 242 bp, Glycine max
  source 1..242: mol_type = genomic DNA
ggtttctcaaacttgtttgttttctcttttcctgtacacatttaatttcataccccttttatgtgtcactctgtgtatatgtattctttcgtagatttttgttttctttttcatctttatgaactactcttgcaaccttttgttacatagaactgccggtaataagttcgtattcttgttttcatgtgcattatatagcttttcttaattcgtgcacgtgttattgttttccacttttccag

SEQ ID NO: 548 - DNA, 694 bp, Glycine max
  source 1..694: mol_type = genomic DNA
ggtatccacacctgaatgctgtggtccatttcttgccattgtatataccttgtgccttgtgtattctagataacatttttttttacaatattctttttgtcttgttttctgcatggttgagtggaaagaatcatgtacttaggctgctatattcggtaacataggttcctaggattaatttatcagcagtttcacagttccaccatgccaggtttttccttatgacttgttttcctcactgtcaaattgaaagctgagacaagttattttccacaattttctcttctgcagttaagtattaggagttacaatattttaactttctcatgtaatcatggttaacttttgattttaagtgtagttggtaaatgcaatgaggaaaatattactcaatttattgaaaacagaatattaaattctgcctgagattaatgaatttctattgctcttttaggggcaaagatatgttcagtaattttaaagtatcaattcatggtgtgaaaaatcatttttcctttgatattgtttttatcttcaatcatggtttgagagggccattctaattgtgttccagtaaatattgcattctcaattggagtaaataaatagatgtctgagtgtattcaaatatgaaacttgttcttgagctaactggttgttatgtgcatcatgatctttttggttttataactag

SEQ ID NO: 549 - DNA, 648 bp, Glycine max
  source 1..648: mol_type = genomic DNA
ggtaagctttctgaatttcaaagataagtttgactagtgaaaatgaaaggaaatatgggaatgaagaatcagtaaggagaaaacagggatttctttggattattatgattgattgatttaagcaaaacttacaagcaaaagtgagggggtggctgatgtttgttactttggaatacattctgttttcaactttctgtgattagaaattaaaatctgatcttttagctcatcatgcagatttcttttattgtgttatatatttgaattagctttttgaggaaaccctttgcaagttatctggaagctcaaactgttaaattgcatcagtaactaccatattccattaggaggggcagtgtattagtatgtctccataaggacgtttgagctggctctctatttaatggaccagctgcttttttttagaccaggctagcaaagaattgtctttcaacattctggaccagcctgaagattatttcgtttccgagccaaacaggctggtttgatgggataaaactaccaaactcatcaagctttgtttccttccccccaagtgttaacgatgtgttttatattctaagttccataaatggatcttcaattcaataagttatgcattcatctaaaagttgaattatcttatag

SEQ ID NO: 550 - DNA, 101 bp, Glycine max
  source 1..101: mol_type = genomic DNA
ggtaaatttaggacaagcctcacaacagttagatttcttatctaagccaatgccgttgctatgagtaacttctgacaggctgatgctgcttctcattgcag

SEQ ID NO: 551 - DNA, 202 bp, Glycine max
  source 1..202: mol_type = genomic DNA
ggtaatttggttatcttgtgaaataacttcaaattataacaacttaaatgttataaataaatagctttttttttctttcaatttggtagattttaaaatcaaaatttgacaaatgaataacattataaactacaaagatactatcattattcttgttataacttgagtttccactggtggataaatctctggcttactgcag

SEQ ID NO: 552 - DNA, 110 bp, Glycine max
  source 1..110: mol_type = genomic DNA
agtaagatatctggatggttttattttcaatatttttgtttcctgcagtgattgaccagtacttttcaatttctattgatttactgagtctactgtattgcaatgtttag

SEQ ID NO: 553 - DNA, 255 bp, Glycine max
  source 1..255: mol_type = genomic DNA
ggttagtcattacttctttcaagaaaattattctgttccatctaagctacactcttaaattgttaagctggttaattttaaacatgcaatgctctgtggagtctcttcttgtttttcccatgtgacaatatcatacttaagttgtggttgaaaactctatatcttcctaatctaactagaagtagtagagctgatttctctgaggttgtctaacttgtcttgtttccttcatgcttgttgaattaatttgtgcag

SEQ ID NO: 554 - DNA, 302 bp, Glycine max
  source 1..302: mol_type = genomic DNA
ggtaaacactttgctatgattctaatgcatgaatttaatttctttaaattgatcaaatcaactgtagatacatccttactttctcactgtacactttagaaggattaaaacctgatgataattgtatgaccgagagattatgcatgtgcttttcttccttttagttctagtttcggttccctgatcaaatatcccagtaagttaaatataatgccagtagcataataggacatcatgtttgaaatgcagatgtggattgcaaaggctgagtatgatgaggctggtccttcaattgtacacag

SEQ ID NO: 555 - DNA, 137 bp, Glycine max
  source 1..137: mol_type = genomic DNA
gttaaaaaaattacgaggatgattttattatttccaaattttgcatgtagaagtgattttgttttgcttgccgtactttgacacatgcatgagaagactaatttactgtgagtgttttgcaatttgctatgtctagg

SEQ ID NO: 556 - DNA, 182 bp, Glycine max
  source 1..182: mol_type = genomic DNA
gttagtctttcttgtgctggctaataataaaaccagcaatgctatgcaaggtttaatttgccaatgggaatgaatatggaccagatactgaatgtgaaaactctacttctttttaatctcacttgaagtaattgtctggcttggctggttgcccttatgcttgttccattaatttgtgtagg

SEQ ID NO: 557 - DNA, 355 bp, Glycine max
  source 1..355: mol_type = genomic DNA
gtaaacattctgtcgtgattctaatgaccaaagtaaaatttgtgtttctgttgtcaaaatgataaatccaaaatggtgttgcctcatgcactttattacgtctctgattgtctttattttagttcgagttctgatatctaaatctctcaatttgatatatagctggttgcttgaattttctctcctcctcacagcagttgaggttataggccactttggatttgtgtgacttttatgaataactagcatcatcctcatgcatttgtgcactccccctagaaattagaatgttgttttgatatggtcaatttagtagggatattaatgatgaggcacttgtttttggaaatgcaga

SEQ ID NO: 558 - DNA, 121 bp, Glycine max
  source 1..121: mol_type = genomic DNA
gtattccgctattctactctcgccaacactaattttcactgtttctttctttctttctttctttctgaatcggttttattcagttcatgttcgttttttgttttggtgaattattatcagg

SEQ ID NO: 559 - DNA, 826 bp, Glycine max
  source 1..826: mol_type = genomic DNA
gtactgctttctcacttttttgagctttgcaagattttggttttaggtttttgtcaattattatgcataattgactgaatcttgatgcttgtctgttaagtaaagatagtatttaatattagatcttgtcatagattgcccgggttaatgagtgcttctaaattctaattacttgaaagtgtaataaagtttttattgaaaaaagaaaaaacatttataccgtacttttatataataaatagatgatttctttcttaataaaaaaacttactagtattttctactactaaatgcgttgacacgtgtcatttcagcttaaataaaaatcttaagttctggatatataactgcattaaattataagagaaagagttttgtcacctgtaatggtattacttgcctcaagtataattgcttcccatggagcatacacgtgattttataaaataaaaaataaataaaaatcactaataacatcttaaaatcagctttaaaaggactgttatgacattttcctaactaaattttgttttaaatataatgaatattttatattcatacttttgatttcttagggcattggctaatatttaactttaatatttattttgtaaaatcttgttgcttttttgtgcgtttgcattgtttgttgtgtatactctttcatttggtaaaaaaactaggtcctctatgtgtttgttgtttctggtttaatagctgtattatttagacactggtcctttttgtcccgacattggtcctttttgcttgcctacaactgtgtggcatactgaaatatttgttcttttacgttgtacaacacagg

SEQ ID NO: 560 - DNA, 97 bp, Glycine max
  source 1..97: mol_type = genomic DNA
gtaaatttccccgtcgcaagtttaacttgtatgcttcattattttagaagaacttgtggagaatagcattactaacattttctttgtcacacataga

SEQ ID NO: 561 - DNA, 247 bp, Glycine max
  source 1..247: mol_type = genomic DNA
gtatgaaaataggtggagaagtgattcatttttctctttccccctagctgatagtttattgtcttttcttctatggtttatttagtgtcgttgatactactagatttgattgatagttgtaggacataatagccttgagttgatacctagtagttctttggtttaataaatatatgttcttcctttttttggcatttgaataattttgactcactctttctaatttaatgtttggtgccagagcaga

SEQ ID NO: 562 - DNA, 191 bp, Glycine max
  source 1..191: mol_type = genomic DNA
gtactaatactttgcaacctacacaaaaaacttcatattttacaagtgaccttcaatagaaaactgatttcaatgcaaatttcttaagtacactgtttttcccattagggatacatgtctggattttgtgctagatgttgtttgtggaattttgcttctaaaaattatttgtgattctctgttctggcagc

SEQ ID NO: 563 - DNA, 922 bp, Glycine max
  source 1..922: mol_type = genomic DNA
gtatatttttgttatttactgaattatagtattatatatgtcaatgaaatgagtttgtcatttctggggtagattattgtaatatcatccacctgcacatggttaaatttgtaaataggatcttgttttttattatcatcattgtaattatagtaattaatactattaatctgcttaaagttactcttgagcctgacagattgttgtctttatgagcaaaggttgataatgtgatgaagacaattattttattttgcacattatatgcctttattaagtaacagttgcatgtgttgtatcaatgttgtttttttgaaagggtatttttgtatcaatgattcaatgtacctcatttcctctttgctatagtagctgactacccagtcttatgtcagcaataatagtgttaatctgtataattatttttcaagatagcttggtaattaataaaaattattcattcatatgtgctgcataatacacataaaggaacttctccttatggtctttttagaagtttgaagtagataaagtaaaacaattgtaaatgtatccttgtaaaatagagtgcggctgttgaaaccaaaagttgttgctacttttatagaggatatgcccgtataggaaaaaaaattaagtattaaaatttaaaaataccataaaaataaatgtagaaatttaatttcttttaaatattgaaataaataaaaagaaatccaccgtacatgtgattgtgcatattggggaggcctgtatgtaataatggcaagttgtgatcagttctgacaactggaatattcaaatctatattgtctttagcaaccttgtcttctagataatattagagttgcaaaaataggatcaaaataaaatcaaccaagtgtgttggagtgttgaacttatttgtttcggtatttccagt

SEQ ID NO: 564 - DNA, 90 bp, Glycine max
  source 1..90: mol_type = genomic DNA
gtgagtatcaaatcatctgggttctgctactacccaactgaatgttaagttcgaagaatattttagattttattgaatgctcaatgcagg

SEQ ID NO: 565 - DNA, 76 bp, Glycine max
  source 1..76: mol_type = genomic DNA
gtatatgtgtaaattgtttttctttttccaccaagttcctttattgtttctaaaactccatgaatgatctaataga

SEQ ID NO: 566 - DNA, 174 bp, Glycine max
  source 1..174: mol_type = genomic DNA
ggtaaaaaaaataaaatacgaggatgattttattatttccaaattttgcttgtagaagtgatttggatagtatgttcttttttgcttggcgtactttgacacatgcatgtgaagggtaccttttgatttgacctaatttactctggattgaaatttgcaatttgcaatgtgtag

SEQ ID NO: 567 - DNA, 508 bp, Glycine max
  source 1..508: mol_type = genomic DNA
ggttagtctttcttgtactggctatgataaacaagcaatgctctgcaaggtttaattttccatcgggaatatgaccagatattgaatgtagaaaaataaaagggtctattaaggacatgtttgattctcttctcactttttggttttaaaaaatgttttctacaacaatttcattctattcaacaatcaatttctcaccccaaaaaaacaagtgttttaaagaccataaaacagaaatagctagaagatgtttttattttgttcaacctctccctcaattgcacattctgctctatgccttgcacacccctccaccagttttctaagcaacctagtttagttggattttgaaaactaaatacagtttttgaaactcaattccaaaaactttggttttctccctaccaatttatatctttttaatctgacttgaagtaattgagctagcctggttgaggttgtctagcttggctggttgcccttatgcttgttacattaatttatgtag

SEQ ID NO: 568 - DNA, 355 bp, Glycine max
  source 1..355: mol_type = genomic DNA
ggtaaacattctgtggtgattcagtgattttaatgaccaaagtaatttgtgtttgtgttgtcaaaatgataaatccaaaatggtgatgcctcatgcactttagtatgtctctgattgtctttattttagttctagttctgatatctaaatctctcaatttgataatagctggttgcttgaattttgtctccttctcacattagttgaagttataggacaattgggatttgtgtaacttctatgaatatccagcagcatcctcatgcaaatttgggcaaacaccctagaatgttgttttgatatggttaatttagtagggatattgatgataaggatcttatttttggaaatgcag

SEQ ID NO: 569 - DNA, 128 bp, Glycine max
  source 1..128: mol_type = genomic DNA
ggttagaagatgttttgccaattgatgagtgtttcttgtgccattgaagaagactgttcactctgtgcttgcttagtattcattgttaaatatgatattgatatatatatttttctcgatgtttgcag

SEQ ID NO: 570 - DNA, 262 bp, Glycine max
  source 1..262: mol_type = genomic DNA
ggtttgtttctgtgattgatcttggatttactatttactataccgtggacatgtgatttcaattggattaggtcagcttattatctgagcaaattcctgtaagttggctgagttctgatttgatattaggcagtattcaattttgtttatacagcaggcttaattccacacgtacaagagtgggatatacatgcatttctacattaattatgaccagcattatttccttattggtttgtcttgttatgttggtattaaacag

SEQ ID NO: 571 - DNA, 123 bp, Glycine max
  source 1..123: mol_type = genomic DNA
ggtttgtactgatgtttttttcctgctattctcaacatccccccctcatttgttcttacaagtaaaatgtattagtttatggaaggcaggtattgagtgtgtactttgttctcttatatgtag

SEQ ID NO: 572 - DNA, 163 bp, Glycine max
  source 1..163: mol_type = genomic DNA
ggtacttctctctctctctctctctcacacccctttgcattgcaacggatcttgcaaaatccgtcaaattagttcatcatttacttccacggatccgaacggtgttatatttctgatattatattaaaagttattcttattatttctgatactgtgaatgcag

SEQ ID NO: 573 - DNA, 137 bp, Glycine max
  source 1..137: mol_type = genomic DNA
ggtatatatcccaaacccaataattcactaagaagtggttgttgttattcttatgacttgttattattgttatttgttattattatggctttgattatgatatgaacttagattggtacattgtgtgttgtgcttag

SEQ ID NO: 574 - DNA, 82 bp, Glycine max
  source 1..82: mol_type = genomic DNA
ggtgactttctggtgcttagttttgaatgttcttttaagtattgttgcttcgtcagttggtaaaatggtcgtgttttgacag

SEQ ID NO: 575 - DNA, 298 bp, Glycine max
  source 1..298: mol_type = genomic DNA
ggtttgtttactgattctgttgcctttgttttagaaactaaaagagctaatgtatcctatatttagttattgaatttagttagaatgcattgataacgtaaagttttttacattgtcatataatcatagattgccatttaggttaagattgtttacttttgtaataattacttcaagaatcatatataaggtgatttctatttagttgatagtataaaagtttttatattgatggtgtatgaaaatgaaactcttaattattttaaatattattgttttatgtgatttggcctgacag

SEQ ID NO: 576 - DNA, 294 bp, Glycine max
  source 1..294: mol_type = genomic DNA
ggtgcttatagagatgagtgaaggttgatgttttgtttttctttataatctcaccctgattgtaatttactccccattactcttattacccatctttggaaataccgattttaattgtaagttataacatatagttgtttataaactgtagttgttttatactctgttacagttttgcacatcatatctggtcaaattacgtgtcataatttgcaaagatttgtttgtataatagggagtttctctttgtgccttctatcagcttgcactttaacatttctttacttgtctcag

SEQ ID NO: 577 - DNA, 1481 bp, Glycine max
  source 1..1481: mol_type = genomic DNA
ggtaattaattagcttctatgccacttaattataatgctgaccactataatgacagtaggttttatctcttgttttttaatctctgtttttgatttctttgaatgtagcctttcatgtcagttgtatataaatattatgatgtcaaaccttacaagtttatgcccttgttgatcattacaactaatcttagatgaattgggtagtgtaactaaaacatttgacaatgtcatatatctttctaaataatattgtatgttattcttaacaagtaatcaaatattgatacagaaataccatgttgagtggcaatctctattggaaagttggtactggatgagcttgttggattctaaattgttggatgctcattagttaaccatcacccttgctttttatgtgaatatcatattttccttctttcaattcagtgcatgaacatcatcattagtttgtttagcattgttcatatttatggatgggattgcaaatttatttgttatcaatacattatatatacttttaaaaaattatttgttcgatgaaagttttaaattccatggtggatttgtgagcttgtcctttaactttaaataatttttaaagagtgttaaaacttactgtacttttacaccggtgtcagttgatttgaatcctaaatgtgtgtatattggtgttctaacaatgaatttgttgacaaaaattagaaatagtgttacaattcctctgtcaccccttatgccttcattgttgatattaacccaacttccttcagtctggacacatcatgtttcctttttctttcatatatatgggtcagcagttatcagtataacaagtgtctaagccatacactagtgttgggtgatcttgatcctacttatagttactgctaattctgaggtacatttgaatggattccccacattgtgatggccatttaactaaggatcaataggttgaggatcttattctatataggtccaacaaccgagaaaggagagcctgcatacaactcacaaaatgactggctttgatactgttgtatgtgtgttggtcaatgaatttatgcaagtaacaatgtatcatggccagacacattcttaatggtctcttgcagtttggagataatttaagatttatgtagagaacttaaatcagttcttcaagagaaaactattactctccccatggaattttcttgaagcaaaattgaactggtgaaagtgaaatgttgtgacttgagaatggggacctctctattctatttcctttttcctgaatgattatgaagcataatttatgaatgaaacactaactgatcaccaatcagtaatcacacacacgtgttatgttgtacgacccatggtttaagagagcaaaaggtggttaacaagttcagtatgttgccattacaatgataccaaattattatttaaagtatacagtccaaagctgttaataatgaaagtttattttccag

SEQ ID NO: 578 - DNA, 84 bp, Glycine max
  source 1..84: mol_type = genomic DNA
ggtagaggctaactcctttcattaaagttgtaatatcttatgtatgcttcaattctaactggaacataatttttcttccttaag

SEQ ID NO: 579 - DNA, 81 bp, Glycine max
  source 1..81: mol_type = genomic DNA
ggttggctacagatctcaagccacgcttgatttcttgtgtcctttaatctttccataacaggtacatctattttcctgcag

SEQ ID NO: 580 - DNA, 941 bp, Glycine max
  source 1..941: mol_type = genomic DNA
tgtaagttggtatcctggatttcttgaaatctttatgtgactagttccgtgtaaataattattgttttagttggcaattctggttaaaatggctaaggcttgcctgacgatagagggatgggagactcatgttttgctaatcctttaatctgttctttgatgcatttcttttcatatgattttcaagactttctgtaactacattcatacttcttgtgccataactcatgcatgtaatatataggatttattattttattatttattattgttgttgttgttgtccactcacttgtagtgcatttggtttaaaggatggaaggagagggttcccttgtttggtttggtccaagagaagtggaggggagggaaaatatgagtaatatattgttaaccgtaataagcattagtgaaggggacgggaggtaaaataaaaccttatcacatttcagtcagcatagtacaaaaattctaaaccactttcccttcccttcaattccccctaatattggaagggaggaaaaaatagaaggggagagatttggcctcctcattcccctttccttgctactaaatttctgaactaaacaatgtaggattaaaaaaatctctcccctcccctccaaatttcatttatgcataaggtaactgttattaatattgttagaatatatgaaaatatctaatattattttgatcttatctcagaatcttagattatcctttaggattagtttccctatatcctcattatctcttagaattggttatcatattttcttatctcatgatttgtttcctatatagttaggatcatgattagtacaattaagggttagtactctaggttgtatgatcacatcgtatcaagtcaatatcaatctcataatagtctttccttttctcccctttatacatattgatttacccctctgaatcag

SEQ ID NO: 581 - DNA, 235 bp, Glycine max
  source 1..235: mol_type = genomic DNA
ggtaggtgtttggtgctcatttgacttatgttttctattgttaaagtcatatattctttattttccgcctctttaaaagacagctcttcaaagttcaaatcctatcagaatcatttatggcaatttttttttaaacatgactaaagtattttcacgatgtgactctgcaattctagctagtgtgtaagtgtaatttgctggcttatgattgcatgactttttcctcttttcacag

SEQ ID NO: 582 - DNA, 1981 bp, Glycine max
  source 1..1981: mol_type = genomic DNA
ggtatgatatttgaaatctatattcctttatatatttttcttaggtaaaaacagaaaaaaaatcactaatttaggcttgaaatgattagactaacttccataaattgaaatttgacaatggaagtgtgaaataatattaaggctaccatttctgagatgaaatatgacagctattagatgcaccacctctattttgagttcatttcctcctaattttaattggaaaaatgtttttatttttctttgataaggcagaccatacttttcttctttgataatttgaaatatatttttcttcttctattttaaattctgaaaaattagaatgaggaaaagggagaccatgttccttacgagctgagatagctctctattaaatgctgaagatgactggatatgacaacgagattctgcaaaacaacagaatgctgcaaccatccaatgctttccttgctcaatatttgcctgccctttccttcctcccgtacccccatccatatttttgccacccaattctggtatcacaacagaattccttctccactcagcatgtagatttgctccccaataaaaattcctgataaggcaccttcagttatgtgcttaggattcaatttcaacgtgctatcattacctcaatgcaattcagtatagctgtccagtgctatcattacctcaatgcaattcagtatagctgtccagtgtccaggttgttacagctttccttctctcttctaatgaactccattggcatgttctctgcagcgatcattttctccaatttctcttgcctcttcatacgcacgtggtccatcacctccatttagctcccgcctattcagcctattcttttttcctagtataaatgtgtcacataccagtcagatttttcttgttttcaactttcaatcaactatcttattcgttttttttagtcagcaaattaaggatatatattgatattgtagggtacaaagggtacccaaacctatatacaaatggtagacaccatctcataagagaccatttcctgatccaaggttactcaatattaatataactatataaatatttagtaacctaggatataccaaaaaatttatctttcaaaaaagaaataaataactacccagtacataaatcttctgtgttggatccactgtgttgtcttttttgcatgtgtctcaacttagatacttaagagtcccttgtacttattgaatttggagtttccatgtgattagtagtgaatcactcgagtttagtcttacttcattgttgaaaaatgaaagaagacttcaatcttccaattttactcagacataacatctttttgggtgtaaagtagtgtcaaaccaagctacccaaaaagcattagctccttttgaaagtagatgattcagtctaaccttccagtatggctaccttgttatgacttcatttcagtcactcgccctgccttacatgaattttcttctgtcttctgtcattccctgctaaagtattacaagtctctcaagcagtttttgcctctcatgtactctttgtctgtcaatactaagggactctttggcttgaatgaaaaacactttatcttggtataaaaatttgaggtgaaaaatataacccaattttagtcttattttattgaaaatagtttcactctgtcctcagttttccaccttcccacctactcaaccaagcaagtcctcaatctttgtattaatcttttgatttgtcacgtcacatctctagttacaagatgctatttgtattcgttcatgggtcatgactaaattgcattgtcatttgccatctgtccaaataactatcattaaaatattcctttattatggatatagccactgcagctctagagggtcttgcgatttctataatctgcacagagcactcctgcctctgtcattgtattttgaaaatgtcgtgcaatttatttatgctgtgaagttttgtcttgcag

SEQ ID NO: 583 - DNA, 645 bp, Glycine max
  source 1..645: mol_type = genomic DNA
ggtagtttgttatttcttctttccttggctctaattgttcttaatctttggtgttgctgaattttttcgttattattattattattattattattattattatatgtcttcacatgtagcacatgatactaatctcaatcctttagtatgtttttctgctagatccatgtcaatgttaatataactgtatagtgacagttaatgtcatatctgtatggctacatatttgtgattgcctattgtccatttttcagaatgtttacagtaactcctaagcacatttttctttgactgaaagtacctattagaactctatattgattttttgagaactaacaaccggattccttttttttagttgataaactggacatattgcaagctaggatacttacctaagtataccaatttaaagttctagtcattttgttacggattaagtgatatatatttctagattctagattgttttaaatatcaagatttaaataaacttttctggatgtccttcttcttcagttcttttcctccttttatctggcggggatgcagtctggttttctataattacttttttcccctttataatgtgtttccaagttgaagttggtaaatctatgttcttcctctgtccccatttttcag

SEQ ID NO: 584 - DNA, 636 bp, Glycine max
  source 1..636: mol_type = genomic DNA
ggtaagcttaggtttcttcttttcattttgcttctgcatgtgtatcctatttagcatgtggattattgaagacacatttattctgtaatttaagcttgcttgttaatttagaaacaaccaccaagtttatcctgtacttatttattatttaataatacatattatctaattagagttacttatcgggacaagctatagaatacctcgagagaattgtgttgttggttgagttaaatctgcagatatttacctgaaaggaaggaaaaaggttggggctcttgaattaaatctggtcttatggccgcaaattatgtgccatgtctaaaattgtgagattcttcccatctcatgattttgaatcttgattgtagcaaaacatcctctgtcccaatgtgatgtcactagaaaattaaaaaagaattaaatctgaagcttttgtctagtcctggatctatctcttttctttttggtacttcctccaaaaatgacagcaacagacaaccatataagttaaggaaataaatgtgctttaaaggagaaagagaaacagtgtgtgatgtttgagattttgtaatcatgaattaggccaactcattgttcccttattctcatcttttctgctctgatggtgatcag

SEQ ID NO: 585 - DNA, 95 bp, Glycine max
  source 1..95: mol_type = genomic DNA
ggtatgagttagttgttaatgttttggtttttctctaggcataggcttatctgtcaatgtagatgtgaaagctattgacatattttaaaactcag

SEQ ID NO: 586 - DNA, 323 bp, Glycine max
  source 1..323: mol_type = genomic DNA
cgtaagttgctttactctctttttttgttcttaccaacgagcgcatgaatcaacttgtacggaattgtttcagtcgtgtctcgagttcgagtctttttagtgtgttagtttttgctagcaggaggaatagaacctgcgactttttcccccttcccttatttcttaaccatccaaccaaccttgtatctccttcgagtgagttgatatgcaactgcgataagtaactgactcgaatagaattgcctttagcagtgtattaaaaaaataaacatttattcttcccactaattgctttgattcaactctaattattaaaattgcag

SEQ ID NO: 587 - DNA, 94 bp, Glycine max
  source 1..94: mol_type = genomic DNA
ggttagttttactttacctttaactttgtttcgttctctctctggaaatggtactttttgttattttaattctctttttgttcttctttattag

SEQ ID NO: 588 - DNA, 75 bp, Glycine max
  source 1..75: mol_type = genomic DNA
ggtgaggctctctgcttcgggtgaaggtttttggagttgacgtgtttagtgcttgattggggatttgatttgcag

SEQ ID NO: 589 - DNA, 190 bp, Glycine max
  source 1..190: mol_type = genomic DNA
ggtgtgcaagtcatgtgtgttttcttcttgttggtgaaacagttcactactgttgataatcatttaagcaaagtgtgttagttgattggcataaaacacgagcagtcatgttgtggaagatgaagttgtttttgttgattgcttagttatgagcttaatgatgataatgtgttggttgctttctctgtag

SEQ ID NO: 590 - DNA, 909 bp, Glycine max
  source 1..909: mol_type = genomic DNA
ggtcagttaaattttatggttttactgcagttgttaaaatgtagggaaagaaaaagtgtacagagaatttcagtgtaatatattgttgtatttgatacttatgtatggatcaatattgagaaaagccttaaattgggcttctaaagatcagtgtgtcatgatgttttagtcatttgaagatttttgtcaccgtattagtctttcaaagatacaaactagctatcaaatttgcccttatgtttcaccactgcagtcttctacaaggatgaatgcggtgataatactctaatttttatttacaaatgtggctagattaaaagtttggttgctttgttccctacataaaagaacaaattttagtcatttgaagatttttgtcaccaaattagtcttttaaagatacaaactagtcatcaaatttgcccttttgtatcaccactgcagtcttccacaaggatgaatgtggtcataatactctaatttttatttacaaatgtagttaaattaaaagtttggttcctttgttccctacataaaagaacatttacaaatagttccatgttttctctaaatctaacaccatcataattatggcaagtggtgcagactgatttgtaaacttttcatgtggggaccaaaatgtaaagtttttctaagtagggaccaaaattaaaaaattgtcaaatatagggatcaaatttttaatttgatctacactatcttgtgagagacaagaggagttaaccttggctatataaccatgcatggatgctaaaaattggcttgcttaaattttatctttctttaaccatccattttggttatgtagtcaagattgcattttcttattctaacacttgatactagtatgattttctagccgtgtaatgttctgttttgtacttgcag

SEQ ID NO: 591 - DNA, 5969 bp, Glycine max
  source 1..5969: mol_type = genomic DNA
ggtaaattttaatgggaacgaaaaataataatttctgttaccattttaccttttctgaatagaatttattggctctaagcattgggcttggagaatccattttgttcctcttttaacttagttattgcaagagatacatggattttggtacttgcacctttctgacaaatataagtgtgttacccacatcctcttgtttttaatatttataacctctttcaagtgcttatatgcaagttatactatcttatattttcatccctttcaatagagagaatacatgtgcccttcctcttcgtctcttgtagaaaaaaatatgtagtttagccttgttttccgcattgttaattgaatttatgatggtcaaccagactatttatccccccatgctcatgaaggtaacatttggcatacaaaataaacaaaatagatcattatattctatttccatgctttacatcaatcttaattggaaccaaaatgaatcagtattctcctcatgtcctgttctgctctgttttttagatgctcaccaaacatagcatataactcatgtattattccattctgctacatctgccaaatggtactataaattctagatcttttccttttcatagtgttgatggtatctttgtagttatgtgacctgggatgccctttcctattccaacttggtgtgatgcatgcttatcaatccttggtagcgccgcatagcggctgacccccaaaacactatagcagtatagtgcatgctgaatggtaacaggatatcatgtttgtaattaataataaaaagttgtatatcttagctcttaagcaagtgtacaactataccagtaaatagtattacagtaacaaaggatgccatgactaacctaagagatagagaaaaaaggagggaatgagtttgggtcttagggagatagatgaccaaataaaaaaaagatccaagactcagactagacagacaataaacaaagaacatgaactgatggaacaaagagaataaaaagaaaaaaaaactactcagtagagagactaaaacacagaaaacatagatcgatgagaataagagtacaatgagaacaagattacaagaaaagctgctagatgggttgttggagacatactggagggccacacgccagagggttgcatgagagttctccagtagttaccaggtatgagaggagaaaagtgaggcatgatagttatgaactttgaaagggttttctacaagcttaagcccttttaaacccaaaatacctccataaaattcccctttaacattaatatttgaccgcattctcaggatttttgacaccataagcatagcagtgctatgtctccatgaaatgcccccattgcagccactactgtgaagtgtgatgctatggtgatgcatatagcagttaggggctgctattcactgctacgatactatagtgcactattgacaactatggtgtgatgcactgtagtgcactattgacaactatggtggaccagctagaccacttgtctccaaaatggcattatttttcagtgaaggttgggtcttcccctgctctcagtatcaattttatctccctacccaaccaaactaattcattcttactagaaactcatgagctgtgagctgtgagcagtgtctttggtggcacatgatgttggcaatgggggcgatgacatgcattattgatagtgggttgggatattgatctgactagtgacatagggcacaagttaaagtgtttcagtatggtgatcagaaggaaaggaagttgtgtggtgtgatggtgtcaaatgacagcagtgacaagcaataatgtgccagtcctctgttgagcagcaactcttttgctctgggatgtgcatgcaattcctctgttcctctgagcatgcatcacatccatccattttagggtccttaaggatcaagcatatttctgattggtttgtgttaggaaccaagaattgaaatgagaaagaaaagaaaggattttattgactagtaagaaaagaacagaaaataagagagaaaactctccttcagaggtttccccttcacaaaggatttctcctttcacaaagagctaatgtgtctacaaatgataagatctccctctctcctatcatttttcccctatttatatctaataaactcctctatctaactaactaaccccttaaccaactaatcaatatcctaactgtggtagctaacttattaatagtctaactatgttaactaactttcccttctccttatatcctaacaatacacccctcctaaaaatcaaccttgtcctcaaggctggaatttgaaaactgaaatgacacacttcctcgagttttctcctttccatctgaaatttcctttgctcttcagcctttcgtcgggcttcctcagtcaatgcaacctgacgagcaagtttttgtctctgtagtacttgctgctcttcacgctcaactgcttcaagatgaactttagcagccgaaagtaagtggttgcagtatccaacatgagtgtcaattttcttctcatcaaacccatgaatatgtaggttggaagcagcagacaactgactaaatacacagacaacattttgcagctcagcaacagttgctctcacctcgtctacagtcctctttgtcttttgtagtgttgatgctgaaaacttttgcattgcaacccctgcatcaaaccttaaagtatagtttgagggtgccaaatgaatggctctcagtagagtttttgtacagtcttgccactgttcagcctcataatgtgtacgagctaaatatagaagtatttgagagtctgtgttataataaaaattccgcaagctatattttcacagccaaagtaaattagtaaaattcccctgagcaaaataaacatgcgatagattctttggcctcttctcattgcgaactgctgcgaagtagttccactttcccgtagtgactctattgcccttagcatcttagacgatgatttactagttgcaagtggtttggtgtctagtagtttggcttacatgccaaaattccttgctttgtcaacaaagaagacccatctttctccttgagaagttgtagttctgctgatgataacccattaagggttgaatgtgagcttgcatccggcgggtctggtggtggtgtaggcgcaatcaatctccatataatcccaaattcatggttgtgggtttcataaagaaaccattatcaccctcaacatctatgacatttactacccaagaatgagattctttgatgataattgagaaatccccttctttttcctgcattttctgctgcaaattctcagtctcttccaccttgatctcctctaccacctcggcatcaatggttttcgagtctttgtcttcgacaacaaactcctccccacggtgggcgccaattttcattagcaggaccctcaagggcttttattgaatcactgtcttgctgtgactttgttacccacacacccaactgcaaagtcgatattgtctgcatgggttgtttgtccctttttcaaactcaagaatgatgcccttttcccatcacaattggtttgcatcaagggtcaacccttagcccctacctttttaccttaattctggatgtcctcacggaacaaatccaagagatagtgccgagatgcatgctttttgcagatgacatagtcctccttggagagtcgagggaggagttgaatgagaggttggaaacttggagacgagctctagaaacacatggctttcgcctaagcagaagcaaatcggagtatatggaatgtaagttcaacaaaagaaggagggtttctaactcagaggtgaaaataggagaccatattatccctcaagtcacacggtttaaatatcttgggtctgtaatacaggatgatggagaaattgaaggggatgtgaatcatcgcattcaagcaggatggatgaaatggagaaaagcatcgggggtgttatgtgatgcaaaggtaccgatcaagctaaagggaaagttttatcggactgcggtaagaccggcgattttgtacggaacagaatgttgggcggtcaagagccaacatgagaataaagtaggtgtagcggagatgaggatgttgcggtggatgtgtggtaagactcaaacaacaacaacaacaacaacaacgccttatcccactaggtggggtcggctacatggatcaatttccgccataatgttctatcaagtacatgtgtggtaagactcgacaggataaaattggaaacgaagctattagagagaggggttggagtagcgcctattatagagaagatggtggaaaatagacttaggtggtttgggcatgtagagagaagaccggtagactctgtagtgaggagagtagaccagatggagagaagacaaacaattcgaggcagaggaagacccaaaaagactataagagaggttatcaaaaaggatctcgaacttaatgatttggatagaagtatggtacttgatagaacattatgacggaagttgatccatgtagccgaccccacctagtgggataaggcgttgttgttgttgttgtttagtctctttaatttcctcaattgttttcttgatcttgatttcagagggctcctcctccatgctttcctcccttttaacctcaagaatgttttctaaactttttagttgtccatgcttcaactctgaaatgctgattttgcaagaatgatggtgcaaccctcaagaattgggttcctcttcctaattgtcctcgctagacctgttattgtcattgttctcctcttccagcttcttgtctctgttgaccaagttttccccactatctgaaggtgtctttcccttcttgaattcaagaagtagttccttgatttgcctcatctccaacaatctttcatttatgagatccatgtctgtttttagatctgtaatcacctttccatgcttgctggccaatttgtccaaagcgctcactctgctctccatcgtgcaactcagatacagcaggttggactagtaagaaaaaaacaaaaaacaggagagaaaactctcctccaagggtttccccttcataaaagatttctcctttcaccaagagctaatgctcaatctacaaatgataagatctccctctctcttatccttcttcccctatttatatctaataaaccccttaactaactaatcaatatcctaaccatggtaactaacttattaatagtctaactatgctaactaactttcccttctccttatatcctaacagtttgttagttatttcttggcattgctgctattccactatcattggtaattcggtattgcttggtctattggttgacaatgtgtttagttttttttattcatttaatattgagtttcactgatttatatgttttttaaaattattttctccagatatttttacaaaatatactacaatttggttccttgttgttttatgctatgttctaatttttatgaatttctatcttttgtgcaattttattatatgaaattctatctcacattcactcacttaatttttaaatttatattgatgtaccatatctgtgttttagaaattcatatccatatctggcactgggtaccgatattgtacccatatgtttgcaacgtaattgttaggttgaacttgaaggtgaaaatgcaaaaacactgatggattgagtggagtagaatcatagttctatgtaaacttaagagcctagaactaggtgcaaaggaacttcttttcaattaacgtaacagtttcaaatgaactacaattaatcaagggtagattgtttgtttttccatgaatataattgtctatcccttttgttcgatcacgtatgggtgttcctgttctttcaattacattttattttgtctttaccatatttacttgtttcttttctattatgtaaatccag

SEQ ID NO: 592 - DNA, 237 bp, Glycine max
  source 1..237: mol_type = genomic DNA
agtatgctctacaattttattctcttttaaggttttttaatttatggataacaatagattccttgcatgaaatgccttaatctactgtctttgttgggttcagagttggtcaatacttgaacagtacctcttctgttataatccatacattgttcctttatctaatgaaaatgagttgatggccaatattttctctgttccccttgttgtgagtgtatctgcattgttgttttacag

SEQ ID NO: 593 - DNA, 2599 bp, Glycine max
  source 1..2599: mol_type = genomic DNA
ggtattgttattgtcctttctgttctgaaatagttattttgattgatgggattttacttatatttgatgctgcagtgctcttgagaagatagaagtggacccctaagattgcatattaaatttagtctactttaacatctttaatctagtcagaatatttgttttcttctaagcactcctaagttgaatttgattttaaattttcacttctttggcaccttttgaatccttattcatttgtaaataggtaaatcaaattctctctcttttcctctcttacgctgtctccgttcaaagaaaaagaagctttaggttccctgattcctggtgtacaatattttctaaagatacaaaaaccaagcacccaccttataatacaggatttgtaaactaactgctaatatatactgtagggatgtgatttgtgtaagctgtcaacactcaacagctatgacactgatgttggtcattctgaacttgtgtacatgtgattcaaaacttggtctaggcagcctttttgttaggatatctactacctattttgtggaaggagagtagattaggaacctttttttagacgcaaagatgagaatgtcagaatgggctgatcttgatggagctgcccatataaccaaaaccaataaataggttggaccaacaaatttgatgcctgaatatagttttgcttggcctgaagtgacaggctcataaaatgtcaaaattagtaatgaattttttcttaagtttacttggatgttagtttaaaacatgaaaaagacaatgggactaaccaaaccaagagggaggagggatgaattggtttagaatcaaattgtcaaaaacagagttttaaaactttcgttgtccaaagaatcgtatcacaactttcagttaaaacaatattaaatcaatcacccaaacattgtaccctttttttaaagtgcatcaatttaaaatatctttgaaacttagcaaattgataaagaatgcaatagtgagagatgagggttaaagagaagatagaaaacaagatttatactggttcactctctatttctagagaaactaatctagttatctaattcaactcaaattaaattttcactatgcaatgtcagtttttacaagtaatcacaagcaatttcaaattctacctagaaaatgaaacttaggcacccaaccctagggtccttagtgaatctaagcctaagacaaacctattcttagcttcaaattataaacacctattctaacatgcagtaaaactcttacacatgcagtaataatgtgtaaaaatcatatgaaacaaagttaaggagagatacaacctttacattgaaatgcaagaacaaaagacttgattgaatggaactctcttgatatcaaatgtgtttacaactcactaatcacataacctttagagaaacttttctttagaaatctacaagaaacaaaaactaaagtttgtgagttgaaaaagttcgttaaaaaattgtttttaaagtgagaacacaaggtgggtatatatagagaaaatagttataaccgtctgtaattgattaaattggcaaagtaatcgattacctttcccagtcaatcgattaaagtgttatcccagtgtaatcgattacaatcttgatttaattgattaaagtgttcttgatcactttttggaacactttaaagaatgatgtaatcgattattatatcttcgcaatcgattaaactaagatcctagacatcagacatggtctcaaattgaattgtgtaatcaattacgaatatatggtactcgattaaaccagagctaagatctctttgcaaacttctcaaagacttatgtaatcgattacagacagcggtaattgattaaaccagtgagttatatagcacaaaagatctaccttatatagggaactaccttcctacttctatgtgatgatgcatgatgtactcatagatagattaagtattataagcaacaagcaatacaaatgctactcaataagaagttgggcatgtaaaagtcaaaacacttcttagtcttgatcttcatgttgctccccctatctctaacaaaacaggcattatttgaagtcacaattgatttgaaatctttaaatgcaagttaatctaagtattttaatacaatttagtcaaataaattatttacaaaattgacgttttcgcacttcaataatataaataaataaaatgtgggccagtgaatatgcccaagtagtccatagcttccaaagtagcctaggtcaacaatttatcagcctgtatcaaaatttggtctaacccatttgtgttggtgtgattcaaatgacttcattccatgacaaggattcaacaaagggagctcccaagtcccaagagatatattcttcggacacttcaaaaattgatgatgaaatttgctcaaatccttcgtgctctcttttatatttttattttcatgtgtttgtctcttttcctttttctgtttctccattaaagtttggtgagagtgattggtaccgtacttgcatttttcttttccttcaaaatcatctgaattaaattgtctgatatttcattagtcacatggcaacag

SEQ ID NO: 594 - DNA, 843 bp, Glycine max
  source 1..843: mol_type = genomic DNA
tgtaagtttttgactttttgcaatatggtcagatttagtatacaactatacatatttacttcagagattatgtttatatctacgatgatctggtgtgttcgtaaatgagcatgtcattatcataataattgaatggactgattaaaaaaacatagcaatcttttgaaaataacattaaaattgcaattttctcttgatttcgttctaataaactttgtcatttttattttgcatttgtttgagctgtaattttgttaatcataataagaaaccaattaattttcattagttttttgtttttttgggaaaaaagtaacagataaaaaagtcactaatttgatatttcatcttgctctcagaaaagagtgaggatattttgttggatagactcgtattatctaaaaatggtagtgttctcagaaaagagtgagctcttcttgataattgactagacccattttcacttcagttttgttttttcccaatttctaacctttttcaataatttacgacatgttagatattttaaggttagatggaagtttgatggagtattgtattggaagatctatatcttctaattctaattgtacttctcttatttaagtcttgtacgtaaacaaaaaaaaaacttgtgtatttgacaaaaggaaaaatgaacgagttcactccacctacaaaattgaaggtaacatatgagattaaaaaggaatgggagtaaagctatacacgtgttaggggtttgtaaatgagtaactcttatgagccgcccacatacctaggttatttgcttatattttcccagaactgaagcttaggtatattttgcacttattggtatag

SEQ ID NO: 595 - DNA, 108 bp, Glycine max
  source 1..108: mol_type = genomic DNA
ggtctctctctctctctctaggcactttacatctttgcaacagagcagaaagatgaaatgtaactacttgagatttctaattttactgttgggattgctctgtttcag

SEQ ID NO: 596 - DNA, 213 bp, Glycine max
  source 1..213: mol_type = genomic DNA
tgtgagttatctacatagtctgataaatattcaaattttgtttgctgcagaggatgtcacttttatgtcaattaaagtcttgaacattccaattaaactgattgattttcttagatgtatcgatttttttttttttaataatcttgtctcaacttgattgtctgttacaagatagtttgtgccactcaagactgattgttctcttatgtacag

SEQ ID NO: 597 - DNA, 1622 bp, Glycine max
  source 1..1622: mol_type = genomic DNA
gtcttatatttttttcttctactccctacgtccctttttataagatattgttttctatatatttattgcattttaggcaattcttaaatactctcacctggccttcaatttttggttagaataatttttttttttggaaaaaattaattttgaaacataatgtagcaatttctttaaaattaatccaaggccaagatccaatttctatgtcacatgttacgttgatttactaggtgcaatatattctggggatacctacaagtttcttgattctttgggtgcgtttatgatcaatatattgcgattcaaatgcctgtacattgttatatatgattaacgtcgtgtcatgtcatgcatgcctgagctttgtattggatcattgtagcattagtgatcctttattttttgttagtatcaatcataggaaagcttcttttaatctattttcaacttttgcttccttaattttctcctttgatcattcctcggacttaattttttctgaaaaaagaattgcgttctattgttagtttttatgtttacatagtggggtcatttataggctgtgctttaaattaaagtatcaatcaacctagcacattacatgtttatttctaaattattacgtttctggtttatgtatcatgtattccattttatcattctatgatcatttttgtgaagtgtattaacatgaatttcaattaaatgcattgcgggctgcggcgatgtgcttccctcatggattgattaaaccttccctggatttggaaatctttgttaattatgtgataatgtagtaattgacatgtcaaaatcaattttgacaaatttatggccttaactcaaataaggaatttctttagctatctgctcttaggtgatgtaatatcattgcagatccatagaaaaggtgatctaaagtcatgtagttagctaagccatttcagtataatatagtccctttaattttttcatttccacacataaaaggtgcatcacttacaaggcattcaactcttaatttcatctttgtgccaaggtattgcttgtagctagtgatttgcactcaacttagaaacacagatagctaccaacttatagactaggtctatatatattccttccactttctatagttatgtttctgaaataactatgtttaaacttgcttttagaaaccttatgagtcaacactgtgggttcttataatttttttgttctgtttctgttgagtttcttattagctgatagctactccatttcctgccaccctttatttctttagtcacattaatacattttatgagcgcctttttattggcaatctttgaggcttcaaaagtggatccgctatactgcttttcttcacattagttgaagggttgaaatcaaatggttaattgttgcttcatttacctgtattttgtcatagaatataaagaatgaaacaaattggagctcaaatttgtaataaaatgatttttgttcccaccttttaagctttaattttctcattaacttaaaatcagaccttggttttctaacaaatactatgtaattgtttctccctttactttttttggcactgattcataatttcatgtacatgtgcttgcagt

SEQ ID NO: 598 - DNA, 74 bp, Glycine max
  source 1..74: mol_type = genomic DNA
gtcagtcacttcctaaaaaaattgggtatgttctatctgacagtgtcacttatttggtgtctatatgctgcagt

SEQ ID NO: 599 - DNA, 534 bp, Glycine max
  source 1..534: mol_type = genomic DNA
gtgtagtaaaatgaaatctgtttgtggtggagcatcaaacatttgttgactttacaacatgctatgaccttttattccaatccttcagtatgaagaaaatctctagtggagaatattccagtaatgagaaatgctacaccctttaacaatttttgtgacattttctctccaattgagtgaaattcatgtgagttctattcctcatttactggggatcctaatcccaaactagtgggatgtacataaatttcaatcaataaaaaagaatgttttaagaagagtgttcgagactatgttattagcactcctctgtattagtacatgatgaaaattgcatatacattgcagtaatgttaacttccaacatatgatgttaaattgctagagatgctttcacatatgttgctctacacactttagaatattcttggcttccttaattgtgcttcttattgattatccacatttctatatcattataccaaattgtccgagtggaatgtccttactgtagtgttgttgttaacatgcagg

SEQ ID NO: 600 - DNA, 1375 bp, Glycine max
  source 1..1375: mol_type = genomic DNA
gtaactacacttccttggaagaacaacatcatactatgatatatatatatatagaatttggattgcatgatcttttcctgttctgttctttctgttgtggtcctaactatctgatcattagtatggactttccatagtcagtttttctagttccttctatatttttgccttttcttttgttttaaagattgagattatagaaaatagtaccaggaaaataagcgctgaactatcaatattaaacttatttgcatgacactcctgagtggtaaaagctgttgtttgattatgattttgacctgtttatgtgaaatcatgaaagttgtaactgctctgttttgattattgactgaaacatctcaacaaaatttaggaagagttgtcccaattttggggctctttttttcttgaaaggttcatggggtgaatttttgtatggggctcaattaggtctatgggttgaatcagacactgttaaaagattgatagtagaaagactgataaattataagctagtgcagtaaaacaagttattcttttaggtcttgtccaatataattattaggtgctgctcattcatgagattgaaagacctgaactgactccttgttcaatcctattttaagggagactaaggaaatgtttggtgtagcttttttaacttaaaagactattttaactttgaagttaaaaatgagttttaaatttagtataaattatgctgataccccttgatgctgaacaacatttcatttgataaccttcttttcttttaccatagacaaactttcctcaattaatataacagttcacatcaacataagtaatgtaatttcttatgcaattatataaattaaggaagatctaagtaatgtaataaaagtatatcaagtgtaatttagttaaatttcagaagttgtaatttgctctaaaatttaaagatatttggtagttttatattttttaagtttagaagttattttaagttaatgtctttgctagcgtgttcttagattttgaattttgaaattagaaataaagaagaaaaaaggaaatagaagttaaaagctattactagagtagtgcggggatcaattaatatgaagttgttttgacttaaccagagatcttaagtttgagtcctatgtatgcatctgtattaagttggattgttaaactaaaagtttaatatcaccaaacatctaaatcaactgacataaaattgttaaaattattttatattctcagtgtataatttatttgctcgttaaaataaactccaaataaattgaactaaatgttagtacctcaatcgttggacttctgtttctctttctaaacatctgaataaacagttttgatgactaatttcagg

SEQ ID NO: 601 - DNA, 798 bp, Glycine max
  source 1..798: mol_type = genomic DNA
ggtacgtactatcgtgtacaaattaatataatattatattttcattcactcatcatcatgtatatggagtttctttttgtgcttatgtgctgattaatcattattactatagatctattagaataattaaaagaacgctactagatctggcttctggaactcacttggttagtactactatcactgcatcaggttcattttcttttctttttatggtgtcggctttctgctgcaataattgatgcttcattatttttgttgtttgagcccatatgttatttcgctgaagttgacacttgacccgtgtagtgggagaacaggaagggaccacgtggccatactttatcatgcctcgttgaatattaaataaatatcttatttgtttcccctaattatatgtgcatgactttgatagtgtaacaattagtaagcaccgacaatgtggttttacttttgtaaattggaaattaagttgagggtaacaaaagtgaatcaaaatctttatctcaatgtcgatcttagaaagaccaattgttcactacagtctatagtacatgaatttacaagtgccacctcaaacaatgtttctttatttcgataatctatgacattattctttctttctttttttcttttaacacctaaccaaccttataactacacctcaaacaatgtattttcgcacatcagaagattttgtatgagtacaacctgaaacaataacgcagcttcactatgggtaaattatatggttttgagtttcatgtatgttcattttgagtcctttttctcgatcag

SEQ ID NO: 602 - DNA, 499 bp, Glycine max
  source 1..499: mol_type = genomic DNA
tgtaagtaccactccctcttggatttggatttctccatgcattcacatgttcaacaattggaaaatgtggataaagttttttcacacaatcaattaccgtaaaactgtcagataaagattcgactgactcccactcagatccggattccctgcattcatttttgcacacattcaaacatttagcaatttgaaacagttacataaatatgagactacataagtatctaagactcaattatgtatcatgtgaagattgtccaagaccatgtatcataatttaagatcatgtaaaatttcccatagccagaattcccttccaccacccccaagtaattaattagccatgtaaccaacaataacttggttaatttaggctagaaactactaaaagaaacttaattatcaaataataaaacaaatttttcaactagtaaaaaagataaaaactaattgaaataccttatcaaatacactcttaatgttaatcttttggttgcag

SEQ ID NO: 603 - DNA, 136 bp, Glycine max
  source 1..136: mol_type = genomic DNA
gtaccttcttgaaccctaattttgtctcaaaaaatcgaaacttttattttttttggtttctctgtttttcaaatcagctcgtgatggggttgttgattttaacgttaaactttgttccttttggtgaattgccaga

SEQ ID NO: 604 - DNA, 355 bp, Glycine max
  source 1..355: mol_type = genomic DNA
gtatcacatacttagttactgtgtcatgttttattgttattctccatcttagttactgtgtcatgtatttgttttgttgtttgtgtttgtctgaaatgtttctgcagtgaaactgtgtagttaatgttgaagttgttgtcccaattcttgttgtcgtggtgcattttcattagtttattaactatattttaatttcgtaaaagaataaaataggaccgagatatatttattattgtgactgaatagtcttttatattcaagaggaacctgtttcatgagctgataaagagccaactaaaaggaaatttgtcgcatgttgaatatttttttttttttgaacattttgtaacacagg

SEQ ID NO: 605 - DNA, 883 bp, Glycine max
  source 1..883: mol_type = genomic DNA
gtaagttgtccctcattacaattttgtgagtgaaggagaggtagttttttttttagtcattcctatatgattgttattatgcaattagaattcagttcctgatgatcatatgctagtctgtgatttgtgttggctgctgtgtgtgttgtatgcatgtgaagttacatttctatttcaggaaatggtctatttgggtggctgcatgttagaatgagagattttacttgagaacatatggtgttgccacttgtgttattgctatatgatacatttggattaatgagatgtctttgttgtttagttgttggtttgtccaaattgaacaccaaaatgtgtagtaacttctaaggatttacattttcaaccatttcaaaatgtttttagaacaagtatccaaattccaaaatatagtttcttttcctctgcatggattctatcttttgaattgtgctgatatggataaatattaagagttcgaacatggccaaaaatcttgttttttgctgcctagagtatagacctcggcatttcttcaaggtcctacagaatgaccattcctgggactatctcatagacagtgccatagtggtgccttgcaccaggcaatgccaaggttccttttcctagtatataataaatggaagaactattctcctagtatgagataatgtatgaattgatgtgtgacagttaggtttgatagttcacaggctaaggtcacaagctgaatatagaatcataggcttttgacaactagttggaaaggatgtgtaccatattaaatattatggaaatagatcatgcatgtatactgtgtatgctttcattaattctgaaaaacatgtgaaggaaagccttgctgacattttctttcatctataga

SEQ ID NO: 606 - DNA, 251 bp, Glycine max
  source 1..251: mol_type = genomic DNA
gtatgcccataaatggagtagtgttttccatttttctttactgagcatttagtttgctatcgtcgttatgatgacattttaaattccaatagaccactactagtaattttggtatgctagtaaacttagtgatctgtagttacctaggatttccttggtttgatgaatacagatttttctcttttggaacttctacaattaaaattatttaactcactcttttatatctttatgttttatgccagagcaga

SEQ ID NO: 607 - DNA, 304 bp, Glycine max
  source 1..304: mol_type = genomic DNA
gtactaatactttattaatcctatcaaaaagaaaaataaaacacttcatcttcatcaactggcattagtaggaaatgaagtgttggcttgcctattgtcttatgcccaatcttgtccacctggctattcttaaatggaaaaccaattactaagtgaagcccttcaagaccatgtttgatgtcttgtcacatagttgtgactagtttggaccccatcatgggcacatgtttatctctattctatgctagatggtgtacttgtaattttattgacaatgctatctatgcttctctgtcctggcagc

SEQ ID NO: 608 - DNA, 194 bp, Glycine max
  source 1..194: mol_type = genomic DNA
gtatgctttttttcttatttacgtcaaagggtcttttatgcaaaggaaaacacttatggtttctgtttgtccttacacgcattgttacatttgtagatcacaaatcattgccggtaggattttcatggccttatcaagtgtataaagtgatataattctttataatcattttctttattttttatatttccagt

SEQ ID NO: 609 - DNA, 89 bp, Glycine max
  source 1..89: mol_type = genomic DNA
gtgagtaaaaatcatcttggctctgctatcatcaaactgttgctaaatagatatcatttttttagagtttattatgttctcaatgcagg

SEQ ID NO: 610 - DNA, 84 bp, Glycine max
  source 1..84: mol_type = genomic DNA
gtaagaaaaggttcttcttttcaatctaagttcatacatcatctctatttttctatgattttacttcattaatggtctgacaga

SEQ ID NO: 611 - DNA, 197 bp, Glycine max
  source 1..197: mol_type = genomic DNA
gtcagttttagcatatcgcatgcatcattacattgaacttgctgtcttcccatcctttaaatgtacttgccattgtaaatttcttgcttttatccatatttgttttcgatctttaatattccaaataatttttttgcatgttgccctctgtgccttatgaagttgacaatgtttgttgggtgtgctctgttgatagc

SEQ ID NO: 612 - DNA, 475 bp, Glycine max
  source 1..475: mol_type = genomic DNA
gtatgtttcatgctttaatttattcagtttaattgaaattactttgttgcatatttatgcaagttaaaaagatcatcatttcaacctagtaaaagggggggaaatgacaaatcaagagcattcagtttctgtctaatttaaggttacttaatgccttggcaagtgatagaagtgcatactatactatttataccttagttaatgtcaggacatgacatttgtacaaagcatgactgatcttgacaaggcttgaatacttaacattagggcattggttaaggaactaaaatgagaaagtatttattgcggaaatcataggagagcataaaaaaagtcatggacaatgcaataaaaacatttctccttttaattccttaaccactgccctaaggcactggttaacatttgcctataaattataatactctattatgctttaaaaaaattctgattgtcttttttcccttattgtaga

SEQ ID NO: 613 - DNA, 130 bp, Glycine max
  source 1..130: mol_type = genomic DNA
gttagctttatgtctttcataataatgctaatagttatgctttgtggatgcagtatccatttgaatggttgcgttacatataggctcttgatgactcacaaatcttgctgaattgttgctttggtgtagg

SEQ ID NO: 614 - DNA, 140 bp, Glycine max
  source 1..140: mol_type = genomic DNA
gtacatgatggatcttttgtttttgtattatttgttgaataaacttactgtcatactcttgttggttttatgggaatatcattttacattaatgttacttttgtgaatttgaaaaattaattgcaacaaatatttgtagg

SEQ ID NO: 615 - DNA, 320 bp, Glycine max
  source 1..320: mol_type = genomic DNA
gtaagccattttttatttgtttgattaacttgaggttgtatagtatgaacttatctgggaactttgaaattgagataagcatatgtcaacatccatgagaatctataaagtctgtatgttcaacattgcatttttggatattttaaaataaactgaaaatgattcatttcattgtgaatgatttcacttgacatattactaaatggagaaaaaacaaattctgtgaactgggaattatgattgtagaaaactgctgtaaagattccttatatcatgtgatcgacttttaaaactttatttatttgccttctctttgcagg

SEQ ID NO: 616 - DNA, 108 bp, Glycine max
  source 1..108: mol_type = genomic DNA
gtttgttctcttcctttattctttttcctgcttcttggaatgttatgttgttgtgagatagtacattcttctatgataataatgacacacttttgttttgagtgcaga

SEQ ID NO: 617 - DNA, 95 bp, Glycine max
  source 1..95: mol_type = genomic DNA
gtacagaatgcacactttttcgtttgatgcttctcgagggaattgttttgcgttaacttttccccttcgttctaattgcaatgtgtcttttcagg

SEQ ID NO: 618 - DNA, 247 bp, Glycine max
  source 1..247: mol_type = genomic DNA
gtaagatattcttgaacattatttggttttgttaggttcagattgtagtatgagcttatccgtacagtgagagtgtcatcagacagcatgcacctggtttacaatggaatgattctttattgtagaaaattgttttaaaactatcagtgtcgtcatcaaccaggaggtgctcctatattgtctgtttttttttctttctccatttcagttttccaatatgatgatgatctattttcctttttgcagg

SEQ ID NO: 619 - DNA, 89 bp, Glycine max
  source 1..89: mol_type = genomic DNA
gtctgtttctgttctttaatatgactaattaactattaactattgctttgaatgcttgctaatgatacaaactgtcgcttgagtgcaga

SEQ ID NO: 620 - DNA, 180 bp, Glycine max
  source 1..180: mol_type = genomic DNA
gtacttctcatctctctctctctctctcacacacacacacacacacacacccctttgcattgcaacggatcttgcaaaatccgtcaaattagtacatcctttacttccccggatccgaacggtgttatatttttgatgttgtaatatttattcttattatttgtgaattgtgaatgcagt

SEQ ID NO: 621 - DNA, 141 bp, Glycine max
  source 1..141: mol_type = genomic DNA
gtatatcccaaacccaataattcactattaaaccatattataagaagtggttgttattattgtgattattattattattgtgactttgattatgatatgaacttagattggttctttgtgttgtgttgtgttgtgtttagg

SEQ ID NO: 622 - DNA, 66 bp, Glycine max
  source 1..66: mol_type = genomic DNA
gtgactttctgaatgttctttcaagtgttgctttgtcagttggtaaaatggttattttttgacagg

SEQ ID NO: 623 - DNA, 297 bp, Glycine max
  source 1..297: mol_type = genomic DNA
gtttgtttactgattctgttgcctttgttttagcaaataaaagagctaatatatcctatattagttattgaatttagttagaatgcattcataatgtaaagttttttacattgtgatctaatcatagattgccatataggttaagattgttgacttttgtaataattactttaaaaatcatatataaggtgatttccgtttagttgatagtatagaagtttttataatgatggtgtgtgaaaattaaactcttaattactttaaatattattgttttatgtgatttggcttcacagg

SEQ ID NO: 624 - DNA, 284 bp, Glycine max
  source 1..284: mol_type = genomic DNA
gtgcttatagagatgagtgaaggttgatgttttgtttttctttataatctcaccctgattgtaatttactccccataactcttattacccatttttggaaatactgactctaattataacatgtagttgtttataaactgtagttttatactctgttatagtcttacacaacatatctggtcaaattacgtgtcataatttgcaaagatttgtttgtaaaatagggagtttcgctttgtgccttctatcaacttgcactttaacatttctttacttgtctcagg

SEQ ID NO: 625 - DNA, 2581 bp, Glycine max
  source 1..2581: mol_type = genomic DNA
gtaattaattagcttctgtgccacttaattattatgctgaccactataataacactaggttttatctttttttttttaaatctctgtttttgatttctttgaatgacatttggtacagtcaatatttacttcatgtcagttgtatataacaacacttagatgaattgggtaatgtaactaaatcaaacatttgacaatgtcacatatctttctaaatattttatgttattcttaacaagtaatcaaatattgatacagaaatactatgttgtgcggcaatctatattggaaagttggtaatggatgagcttgctggattctaaactgttggatgctcattagttaactatcacccttgcattttatgtgaatttcatattttccttctttcagttcggtgcatgaacatcatcattagtttgtttagcattgttcatatttaaggattggattgctaatttatttgttatcaatattatagcagtgttttactgtaatgttgtgtgtcaatgtagatcacacctcatgctatttataatatggaaaaggaaatcaacattgattacaagatcaatcaattactgattaattactcccctcaagctggagcatatgtgagatatgaaccaagcttgttacaaatgtggtaaacccgatagaaactaaaggtagttcgagttgtgtggttgggccagataaacatggctcggtggcagccaacgaaggctcgcaatgacgatggagaccaatgtgacgctcgccggatatggtcacgcattgtgtgcgtgaacttcatgcgctcgggccctgcgtgaggctgcgtgcagtggtgtttttgagttggctgcacatgtggacgacatggtggtctttggcgatgacgacgggtactgctcacccgtgaaaaagcagaaaggtccgctggggacaccttgaggcagagggagagaagataagtgtgatgctggctggagatgtgtcatgcgtcgtgtgcatgaacttcacgcgccagggccctgcctggggtcgtggcggtggtgttttagttggcagcgcacatggatgatgagacgatctgcggagaggttgctgaaaaaggttaaacaggttgctggaaagagacgaagcacgatagttcggtcgctggattgtggatcagccaaacaacgacaaaacagaggcaaataacagccaaatgggcccaaacaaaggccaaacaggttcgtcaaaggagaaggaggatggtgaggaggtcatcggagaaagggttgtgcaaaaacaatgccacgtgccagaaaggggatcgcgggtgagcgtcacgcgctgagcgtggcagtgtgtgcagcggtagaagtggtcatggtcgacggtgttggattcgctggagagaagggcttctaatcggagggtcacaccggcgagatggcagcgctgtgatagtgtaagggtgctcgcagtgtgtgtgctactgttcacatgaaaggaatgctgtggcgaaaaggggaaaaattgttggaaagagggacgttagcagagaggtccactggaatgcagaaacagtcaccgcaagacgtagacaagcagaaaaccattggggaccaagtggaaacaggtcgtcggaaggcgaacaaagcagagaggtccaccgggatgtggaaataggtcgctgaaataggactactagtagagaggtccatcgaggacctactgtccttggtggagaacaactttcgttattcctctgtcaagaataacctaagctttgataccatataacagtgttttattgtaatgttgtgtgtcaatgtagaacatacctcatgctatttttaatatggaaaagggaatcaatatcgattacaagatcaatccattactgattaataggaaatagaatattctaataataatataatatcaggaataatatcaaaacataatctctcaaatgtattatatataattttataaaaatgatttgttcgatgaaagctttaaattccatggtggatttgtgagcttgtacattaacatttaaataatttttaaagagtgttaaacttacttttacactggtgttagttgatttgaattctaaatatatgtatattggtgttataacaatcaacttgtcggcacaaattagaaatagtgttacaattcctctgtcacccgcaatgccttcattgttgatattaacccaacttccttcagtctgaatgcataatgtttcttttttctttcatgtatatgggtcagcagctatcagtataccaagtgtctaagccatacactagtctgaaagtgaaatgttgtgacttgtgattctttatttccatttattgagaatggggacccctctattatatttccttttttctgaatgtttatgaagcataatttatgaatgaaacactaactgttcgccaatcacgcacacaagtgttatgttgtacaacccatggtttaagagagcaaaaggtggttaacaagttcagtatgttggcattacagtgttacctaattattatttaaagtatacattccaaagctgttaataatgaaagtttttttttccagg

SEQ ID NO: 626 - DNA, 84 bp, Glycine max
  source 1..84: mol_type = genomic DNA
gtaggggctaactcctttcatttcagttgtaatatcttatgtctgcttcaattctaactggaacataattttctttccttaagg

SEQ ID NO: 627 - DNA, 81 bp, Glycine max
  source 1..81: mol_type = genomic DNA
gttggcttcaaatctcaagccacctttgatttcctgtgtcctttaatctttccttaacaggtacaactattttcctgcagt

SEQ ID NO: 628 - DNA, 929 bp, Glycine max
  source 1..929: mol_type = genomic DNA
gtaagttgatatcctggatttcttgaaatctttatgtgactagttccgtgtaaataattattgatttagttggcaattctggttaaaatggcttgcctgaagatagagggacaggagactcatgttttgctgttcctttaatctgttctttgatgtatttcttttcatatgcttttcaagactttctgtaactacattcatatttcttgtgccataacgcatgcatgtaatatataggatttattattttattactattgttgttgtccactcactagtagtgcatttggtttaaaggatggaaggagagggttcccttgtttggtttggtccaagagaagtggaggggagggaaaatatgagtaatatattgttaacccttataagcattagtgaaggggatggggggtaaaataaaatcttatcataattcagtcagcatagtaaaaaaattataaaccacttcccctccccttcaaatccccctaatattggaagggaggaaaaaatagaagaggagagatatggcctcctcattccccgttcctcgcttcttaatttctgaactaaacgaggtaggatttaaaaaatctctcccctcccttccaaatttcacgtatgcataaggtaattatcattaatattgttagaatatatgaaaaatatctaatattattcttttctcagaatcttagattatcctttaggattaatttccctttatcctcattatctcttagaattggttaccatattttcttatctcattatttgtttcctacatagttaggatcatgattagtacaattaagggttagtgctctaggttttatgaccacatcatcacatcatatcaactcaatatcaatctgataatagtctttccttttcttccctttatacatattgatttacccctctgaatcagc

SEQ ID NO: 629 - DNA, 10659 bp, Glycine max
  source 1..10659: mol_type = genomic DNA
gtaggtatttggtgcccatttgacttatgttttctattgttaaagtcacatatagatatattctttattttctgtctctttaattgacaactcttcaaagttcaaaattcaaatcctatcagaatcattatggcaattttttttaaacatagctaaagtattttcatgatgtgcttgtgcaattctagcaagtgtataagtgtatattagagtatgataaggagctgcagttattcaactgcagtctcatctagcttctagtagaagttagttagttattagtagttagttagtcagtcaattctgttaacagaattgactatatatactctttgtaaatctgaaattacttgggttagtaaatgatattttacttcttcatttctcctttctctctctctctctctctttctctctcagactagaaactttatgatggtatccagagcttagttgatcatcaatgatgacaaactctatctcttcttcttccacttccgcttttccaaatttgatctcacagaagcttgatgatttggatttcttactatggcgacagaaaattgaacttgtcatcaagtcacacgaacgtcaaaggttcatcgcgaatcagcaaattcccttatgattccttactgaagtggatcgtgatgcaggagttgagaatcctgcatacgaggcgtgggaacagcaagaccaggttcttcttgcctggttgcaatcgactctgtccacgtcgttcctatctcggatcattggatgcgtccattcctatgaggtttgggaatggatccatgattatttccacaaacagatgcaagccagagcaaggcaacttcgaactgagttgcttgcaatgatccttgaagataagtccatgtgcgagtttctgctcaggatcaaagcaatttccgatgcacttgtgttacgaaccagaaacagagaactaaatgtaacagtgaaaaaaaaagaagatcacagggctttattgattgtaataaaaagatgaagacaattacagaaagtggaataacaattcctggatttctgactcagagctaggccccgtttaggaagttaacacttcctaaccattctagtgacttaatacaatccaagataaattcccattccctttcctactccttatataacagaactactcaactaggccctcactccaagaccacgtcactcccataactaactagccactaattcccttcttgccccttctagaatacacctgccatatcctaggcttatttgtctcattatgaatcagctgctcacgtggcaatgctgcctgggacctatcaatactcccctcttcagctgcaatcttgtcctcaagattgaatttagggaactgacttttcatcatgattgcttcttcccatgtggcttcttcagcagtttttcccttccattgaatcagtacttgcttgctctcctctccctgttgtcgtactttcctagtggccaaaacagctgcaggttcatactcttccatctgatcttcctccagcagttcaggtaattcctcctcttcctgataatttcccactgccttcttaagtagagacacatggaacaccgggtgtactctggaccctacaggtagcttcaacttataggcaacagcaccaatcctttctaaaatagggtaaggcccataataccttgctgacaatttggcattaatccttgtcaccactgatttctgcctatgcgctctgagcttaacaaacacccactcccccacagcaaagctcttgtccagcctcttcttgtctgcttggttcttcatcctttcttgtgcctttagcagttggttttcaattgtctcagagcctcatctctgtcaatcaattctctttgcactgcctctactcttgtctctccttgtaaccatcttgtcaacttaggtggcggcctcccatacacaatctcaaatggagtcttctcagtagcagcatggtaattagtgttgaaccaatattcagcccaatgcacccatgatacccatgttttgggctgatcagcaatgaagcaccgtaaataggtctccaagcacctattcaccacctctgtctgcccatcagattctggatgatatgctgaactcatcttcaactgtgttccctgcatcctaaacaactctctccagaaactgctcatgaacaggggatcccactgacaatggaaagtggtatcccatgcaacttcaccacctctttgcagaaaatctcagctatacttctggctgtataagggtgtttgagagggacgaagtgtgagtatttggacagcctgtccaccaccaccaatatggcctcaaaccccttagacttgggtaatccagagataaagtccatggagatgtcctcccatacctgttcaggcaccggtaaaggctgtaatagccctcctggagatgtagctaaatatttttgcctttgacatacatcacagctcctgacatattcctgtacagctcccttcatcccaatccaatacacattagcagcaattctcctgtaagtcttgtaaaatccagaatggcctccttgtggggtagcatggaactctctcaaaagagtagggatgagctgtgatttgctagatatgaccaatctgccatcataaaataaaactccctgcttatactcatatcctggtttggctccagaatcttgctgcaactgcctaatgatgtcctgtaacttgggatcttggttaatttcctccttaacttgctgctcctgatcccattgtgcacaagatgtgatttgattcaattctgtcccttcatgcatcctggacaacgcatcagctcctttattcaattttccttgtttatacacaatctcaaaatcgtagcccaacaacttggctgcccaattctgttgctctgctgtcacaattctctgctgcatcagttgtttcagacttttttgatcagtggaaactataaacttcctccctaaaagataaggtctccagtgctgtattgctaacactactgccatcaattctttctcataagcagatttcgtcaaattcctcgctcccaacgccttactaaagtatgcaacgggcttcttgtcttgcattaaaattgctcctataccaccaccagaggcatcacactcaatcacaaacccttttgaaaagtctggtaaagacagaactggagatgtagtcaatctctccttcaactcatcaaatgccttctgcgcttccgctccccacttgaaattatctttcttggttaattcagttaggggtttagctatcttcccataatcccttatgaactttctgtaataaccagtgagccccaaaaatcctctcactccctttacattcttaggagtaggccatgccatcacactcttcaccttgtttggatctacagccactccctcttcagttatcatatgacccaaatactccaccgttttctgagcgaaatagcatttctttttgttagctactaggctgtgttgagccagcaactgcaacacctccttcaaatgcttcgcgtgagcctcccatcctctactataaattagtatgtcatcaaaaaacaccagcacacactttctcagtaacggacgaaaaacatcattcatgaggctttggaaagttgaaggagcattcatgagcccaaaaggcatcaccaaaaactcataatgcccctcatgtgttctaaaggctgttttaccaatatcagactccttaacccttacttgatggtatccagactttaaatccaacttggaataaaagttggcaccatgtagctcgtcaagtaactcctcaataacagggataggaaatttatccggaattgtcactttattgagtgctctataatcaatgcacatcctccatgtattgtccttttttttgactagaatcacggggctggaaaaagaactggtgctgtgtctgatgacccctgctgccagcatctcttggacttgtttctcaatttcattcttgtgatgatggggatacctgtatggtctcacatttactgctccatgattctctaacaagttaatggcgtgctccttgttccttctaggaggaagaccaaagggctcttggaacacttgtgcatattgttctaaaattaaacccaactccttttgttggtgtgcagtcagccttgtccctccttctactcctctcttctccatcccccataactcctttggtttgttgaactttggcttagacaggatgcactgcagcgccaccaattccctttcacacccatcaatttccttgcaatataacccatttcttattgctccaaaaactcatcgtctgctgacgccaattcacaatcatatcccctaaggtcttgagccactccattcccagcacgacatctattcctcccaattcaaacaggtgcatctctggagataacttgaactcaccaatgttcaattccaaccctttaaccacgccttgagattgagaccgagagccatctccaagcttgatgctcatggatggggtttcttctatggaccactccatcttgtgtaccaacttctgggaaacgaagttgtgcgtcgcaccactatccaccaaagattaacaccggaacaccacatatcctcccctgcagcttgaccgttttatggttctcatacgcaatgtgattcaagttcagaacacacatttcagccttatcgtcttcatcagactcttccacctctactgctattaccttcgcctccgcctcctcgtcgtcgtcatcctccaacaccagaatcttcagatgtttttcaggacacttgtgcatggggtggaaagcgcctccacatttgaaacaaagtcctttctgtttcctttccatcatctcctgataagataaatgtgtgaatcccctttctcgtggtccattgcgcctcttatgattatgggccattttatctcccttaggcccaactccacttcttttctcttcttcctgtccttttaccatgacccagtcagtgcttcctttacccgacccatgggaactgggccggtgtgacccattcccagatttggacccacggtaaaaacccgacccggtgcccttaatctccttctccactgctcttgtcacttgcaagagcttcgttctactcatctcccccatcgctgccaaactcctcaccttcccacggatctccgtcttcaacccatgtaaaaaataccccaggaactgtttatctggaagtctaggtatctgtgctgtgagatactcaaactcagtgatatattcatccacagtcccttcttgcttcaactccgtcagctgttcatacacgtcaccttccccatgacctccataccttccgagcagttcatccttcagattttcccaagacagatcctcattttccccaattagtgaattgaaaaaatggatcgtcggaccctccatacatagttgcgccaacctcaccttgatctccggtgtggtatcctgaactcgaaaatagatctcggcgcgtgagatccaccctgtcggatcctcgccggtgaaagatggtaattctatcttcttcactgcgtgacgaaactccgctagcgattcttcccggatcctgttggtatgcaccctctttgactccttcgtctccaacaacggcgtattcgccggtgttcccttcaccgatcctccaggaccttcctcctcaaacatcgtcttccccagacacttctcaagcattgcaagcagattcgcatggttctccctcaccgcattctgtacgttagcaagtgtggtacgtacttctgagatctcactttctagagcttcgaccttagcttccatctgtttgatcgtcgttttcttgaccggtggcattcactggttccccgtcggagatccgacaggtcggaccaatttgttacgaaccagaaacagagaactaaatgtaacagtgaaaaaaaaagaagatcacagggctttattgattgtaataaaaagatgaagacaattacagaaagtggaataacaattcctggatttctgactcagagctaggccccgtttaggaagttaacacttcctaaccattctagtgacttaatacaatccaagataaattcccattccctttcctactccttatataacagaactactcaactaggccctcactccaagaccacgtcactcccataactaactagtcactaattcccttcttgccccttctagattacacctgccatatcctaggcttatttgtctcattatgaatcagctgctcacgtggcaatgctgcctgggacctatcaacttgcctctgttggaagtccaatttctcttcaggaacacattgatgctatacttgaaggacttccgcaagattacctttcagtaatctcagttatagaaagtaaatttcatccgcttcctattgaagaagttgaagcactgttgctagcccacgaaactcaactgctgaagtttcgaaaacatacttctaaattgccttcgattaatcttactcaggtgaaccctaactctccttcaccgtttggttctgattcttatgcagcgtcaaacaagtcctcacaacagtatgattcatttggtcatggaagttttaaccgcggtgaccgttgtggtggtggtggcggcagtcgtggccgtgggggaggacactttgcaaattttcaatgtcaagtatgttacaaatatggtcatactgcatctgtctgtcactacaggcttgaccatggctgtcaacccaatccttcactcactctacatgatccttcaaatcaaggaaatactcagactaacaactttagtcaaaatcagtattctagtcaaggaaatggttctggtcaaaataactatggatgtggtcaaaataactatggacagaacaatggtttcagatcatcaaattcatggagtcaaggtaccaagcagaacaggtcaatgcaaaacaatcagaatcaacagcctccaagtgcaatgattgcaaacttcaattctaactttcagactggtacccctacaacttggataccacctcatttcatgtgacaggggaatcacagaatatacagcaactcagtccctttgaaggtccagaccaaatttatattggtaatggacaaggtttgcctattcattccactggttcttccactttcatttctcctattaattcaaaagtgtctctatccttgaatcagcttcttcatgtgcctactataacaaaaaatctaatcagtgtcagtaaatttgctctagataatggtgtatattttgaatttcatcctaatcattgtcttgtgaaatcaccgggagccaatgagatcttgcttcaaggctcacttggacctgatggtttatatgtcttcccaaaccttcatctccaaagttcaattgctgccagttcagcttcttgctttgtttcaaattctgtaaccaatatctgttctgatgtaaataatctcaattttgatgtaaaaactacttctgttgcacgtgcatgtactagaacaggctctcaaactctttggcaccttagattgggccaccctagttctaatgttttgagacttgttcttaatcattgtaagattcccatctttaataaaaatgtcttcgaattttgtactgcttgctgtgttggtaaatctcccagattacctgcctctttgtctgaaacagtttataatcaacctttggaattaatatatagtgatccatggggtcctgctcacattccttccaaaaatggttttcactattacataaccttttttgatgcctattctaggttgacatggatttatttgcttaaaaataaatcagaaaccttcactgttttccaacagttcaagttaatggctgaactttagtttgattccaaaattagaagtgttcaaacagactggggaggggagttcagacctctaaccaagtttttagcaagctagggtatcactctcagattgatctgtcctcacactcatcaccaaaatggtgtagtggagaggaaacacagacatattgtggaatgattcactcttcttaaacaagcctccctacctctcaagttctgggattttgctttcgctacagcagtatatttgattaatagattacctaccacctctctgaattttaatgttccttatactgttttattcaacaaaagtccagattataacttccttaaagcctttggttgctcttgtttccccttccttagaccttacaatcgtcacaaacttgaatttaggtctcatgagtgtgtttttctggggtattccacatctcataagggttacaagtgtctttctcctactggcaaacttttcatctccaaggatgttgttttcaatgaagtcaaatttccttattcagatctgtttttgtcttcctctaagtctgaatcacccccctattaaccccacttctttaattccctccatacctatcgttcctcaacccatttcttctctatccccctctagcaattctattgctagtcctacttctgttgatcccacagcggattcaaattccaattctagtcctcctatcagtgctgattctagtcctactattgaacctgaggctcctagtcctatcttggaagctggatccacttttgtgcaagacaattctcctcagtcataagctttgtctccctctgaagcatcacacagtgcagcattggagaatgttcctgcagttaattttcatcctatgcagaccagatcaaagtctggaattcatttaccaagcctttatccaactctgttgcttgctcactgggaacccaagtctgtaaagcaagccttgactgattcaaaatggtttactgcaatgaaacaagaatatgaggcactgatgaataacaagacctgggatttggtttcccttccatccaataggaaagcagtggttgcaaatgggtgttcagagtaaaagaaaatgcagatgggactgtcaatagatacaaagctagactagtaaggatttcatcaagtggctggttctgatttcaattaaactttttcccgtcatcaaacctgttacagtaaggttgattctaaccttgggtctaaccaataagtgggaactctttcaacttatgttaacaatgccttcttaaatggttttctagaggaaaccatctatatgcagctaccccctggatttgaaaaccccaatacctctcttgtttgtaaattgaataaggctctatttgggcttaagcaagcaccaagacagtggtttgatagactaaaatctacactcttgcatcttggtttttctgcaagcaagtgtgacccatctctctttgttttcaaagatacctctcatatcatttatcttttggtgtatgttgatgatattataatcactggcagttctgtcaacttagtccagcaatttactgtcaaacttcactctaatttttcccttaaactacctgggaagctggattattttttgggaattgaagtcaagaccctaactgatggctctattcttctaactcaaagaaaatatataagagatcttctacagaaaactaaaatggctgaggcccaacctattgcttccccaatggtttctggatgcaagctcactaaaacaggagcagacctcttctctgatcctcttgaagccaagtagttggagctctccaatactccactataaccagacctgagctaagttttgctgtaaacaaagtctgtcaattcatggccaatcctcttgaaactcactggacagcagtgaaaagaattctcaggtatctaaaaggttctttacaccatggcctacttctcaaagctgctactccaggagttcccattcctattaaggccctatgtgatgcagattgggcttctgaccctgatgattgcagatctacttcaggagctgctatttattttggccctaaccttatttcttggtggtctaagaagcaacagattgttgcaggatcaagtactgaagctgagtatcgaagcctagctcaatctacagctgaagtagtgtggattcaaactctactgactgaactctattcctttcactactccagcaatcttctgtgataatcaaagtgctgttgccatcattcataaccctgttcttcactccaggacaaagcaaatggagattgatattttctttgttcaggagaaagttctggcttagaaactgcaagtctatcacattcctgccattgatcaatgggcagatgccttgacaaaagctctatctccaaccagatttcttttgttgagatccaaactcaatgtccttgagcctcctccaaagactcaaccccattgagtttgaggggggtattagagtattataaggagctgcagttattcaactgcagtctcatctagcttctagtagaagttagttagttagtcaattctgttagactctctaacagaattgtctatatttagtctttgtaaatctgaagttacttgggttagtaaatgatattttacttcttcatttctctctctctctctctctctctctctatctctttctctttctctcagtagaaactctatgagtgtaatttgctgccttatgattgcatggctttttcctcttctcacagg

SEQ ID NO: 630 - DNA, 1656 bp, Glycine max
  source 1..1656: mol_type = genomic DNA
gtatgatatttgaaatctatattccttgatatatttttcttaggtaaaaagagaaaataatatccaatttaggcttgaaatgattagactaacttccataaattgaaatttaacaatgaaagtgtaaaataatattacggctaccatttctgagatgaaacctatgaccaatattagatacaccacctctaatttgagttcatttcctcctaatttttattggtaaaatatttttcttcttctttgataaggcagaccataattttcttctttggtaattggaaagatatttttcttctatcttaaattctgcaaaattagaatgagaaaaagggagatcatgttccttatgagctgaggtagctctctattaaatgctgaagataactgtaaatgacaatgcagattctgcaaaacaacagaatgctgcagccatccaatgctttccttgctcaatatttgcctgccctctctttcctcccgtacccccatccatatttatgccacccaattctggtatcacaacataataccttctccactcaggatgtagacttgctccccaataataattcctgataaggcacctcagttatgtgcttaggattcaatttcgacatgctatcgttacctcaaagcaattcagtatagctgtttaggctgttacagctttccatctctcttctaatgaactccattggcatgttctctgcactgatcattttctccaattcctcttgcctctacgcatgtggtccatcacctccatttagctccctcctattcagcctattcttttttcctagtataaatgtgtcacatacctccatttgcatgtgtcttaaattagataacttttaagagtcctttgcactttcttattgaatttggagtttccatgtgattagtagtgaattactcatgagtttagtcttcattgtcgaaaaaggaaagaagacttccatctcctaattttattcagacataacatctttttgggtgtaaagtagtgtcaaaccaaactacccaacaaacattagctcctttttgaaaggagaggatccagcctagccttccagtatggctaccttgtgatgacttcatttcagtcactagccctgccttacatgaatttccttctgtcttctgtcattcccagctaaagtattacaagtctctcaagcagtttttgcctctcatttactctttggctgtcaatactaagggactctttggcttgaatgaaaaacactttatcttggtatagaaatttgagcggaaaatataacccaattttagtctgggctattattttgttgagaaatattgtcactctgtacttagttttccaccttcccacctactcaaccaaacaaatcctcaatctttgtattaatcttttgatttgtcacgtcacatctctagttacaagatggtatttgtattggttcatggatcatgagtcatgactaaattgcattgtcatttgccatctgtccaaataactataataaaaatattcctttattttgatagaaccactgcagctctagagggtcttgcgctttttataatctgcacagagcactcctgcttctgtcgttgtattttgaaaatgtcatgcaatttatttatgctgtgaagttgtcttgcagc

SEQ ID NO: 631 - DNA, 688 bp, Glycine max
  source 1..688: mol_type = genomic DNA
gtagtttgttatttctcctttgccttggctctaattgtccttaatctttggtgttgctgaactttttggttattattattattattattattattattattattattattatatatatgtccacacatgtatcacatgacactaatctcaatcctttagtatgtaattctgctagatccatgtcaatgtaatttttattgacagttaagtcatatctgtatggctacatatttgtgattgcctattgtccatttttcagaatgtttacagtacctcctcgcacatttttctttggctgaaagtacctattagaactttattgattttttgagaactaataactgcggattccttttttttatagttaaattgataaacttttcaatgtagttgtaaactggacatattgcaaactagggtacttacctaagtataccaatttaaagatctagtcattttgttacgcattaggtaatatatttctggattctagattgttttgaatatcaagatttaaatgaatttttttggatgtcctttttcagttcttttcctccttttatctggtggacatgcagtctggttttctaaaaatacttccccccccccccccctctccccccctcataatgcgttttcaagttaaagttgataaatcaatattcttcctctgtccccttttttcaga

SEQ ID NO: 632 - DNA, 634 bp, Glycine max
  source 1..634: mol_type = genomic DNA
gtaagcttaggttttttcttttcattttgcttctgcatgtgtatcctatgtaccatgtggattattgaagacacatttattctgtaatttaagcttgcttgttagtttagaaacaaccaccaagtttatcctgtacttatttattatttaatactacatattagctaatagagttacttatcgggacaagctatagaatacctcgagagaattgtgtttttggttgagttaaatctgcagatatatacctgaaaggaaggaaaaggttggtgctcttgaattaaatctggttttgtggccgcaaattatgttccatgccttaaattgtgagatttccatctcatgattttgaatcttgattgtagcaaaatattctccgcccaatgtgatctcactagaaaattaaaaagaattaaatctgaagcttatgtttagtccctccgtttatggatctatctcttttctttttggtacttcctccaaaaatgacaacaacagacaaaaagttaaggaaataaatggtgctttaaaggagaaagagaaacactatgtgtgatgtgtgagtttgtaatcatgaattatgccaactcattgttcccttattcttatcttttctgttctgttggtgatcaga

SEQ ID NO: 633 - DNA, 99 bp, Glycine max
  source 1..99: mol_type = genomic DNA
gtttgggttagctgttaattttggtggtctcttttcaattttcataggtttatgtgtcaatgtagacgtgaaagctattggcatattttaaaacccagg

SEQ ID NO: 634 - DNA, 623 bp, Glycine max
  source 1..623: mol_type = genomic DNA
gtacactgccttatatgatcattgctgttttatgtgttgtttacatgaattctgtatttggtaggttgtatcttcatgtaatttggcttgattctttaggtcttttgagtttggtgtattttctttactcaatttttggcattggatataagaaagattaatttgattgattttcaacttgattgtgttacttgctcagttagatgtaaccttaaacttggtatattttccaaattgcttctagggtccactgtttagcactctgccaaattggaaaactaggaatatcacttcaatttggatcaacatattactactctgctctgtagttatatgtttaaatgtaattctagaatcttataatttaacttgttcatgttgtttctatcattgtttcccattaattggttgagttattgtggagtcttggtggggtgttaagagtataaaaccatttggagtccaaattcatatcgaatgaattttatcactttctagtttctaagcttctattttctcattactctaaaaccagaacttaatttttgtttagacgaatccatttttattatttttcatcttttcttttataccaataactttcatttctatctgcttgcagt

SEQ ID NO: 635 - DNA, 90 bp, Glycine max
  source 1..90: mol_type = genomic DNA
gtaattcaatttctgacgtagatcaaaattggcgattctcttccttgttttagctggaaaatgccatttactgtgtatttatgatgcagt

SEQ ID NO: 636 - DNA, 441 bp, Glycine max
  source 1..441: mol_type = genomic DNA
gtattttattaaaatcattggaaaataacaaagaaagtaaaatgatctgtttgtggtgcatcaaacacttgttaacatcattctgtcttcggattttctagtctttgattcaggacagtattcctgtaggaaatatatttcttgcctgactaatcaaattcaaatggaaacaaatccagtgaaatattgtaggatgtcccctattttatttttgaatattctaagatgcaatgtaacattgtcacaaagtaaactacccactaggcttaaattactatagatacagataactttttctcatttgttgctctacattctctagggatttcttggttttgttaacttgtgttttattgtttacttattaattgtttgtatgtgtattttgttattgattatccatgtggaatgcctttatgatagtactgtttatcatgcagg

SEQ ID NO: 637 - DNA, 201 bp, Glycine max
  source 1..201: mol_type = genomic DNA
gtaagtaaacttccttgtaatatcatattatgagtgatagtttagaatgtgttccttgcctaacggtttttttccttctattgtaattctaataacataatactttgtccaataatagctagtttggggacatgttctttgaagttttccattttttcttgacaaaaatcttatagggtgattttgatggcaaatttcagg

SEQ ID NO: 638 - DNA, 583 bp, Glycine max
  source 1..583: mol_type = genomic DNA
gtaagttcatcagaaaccctaattgctgatctgattgttatattgtgtgtgcgtgtgtttagttatgattaattcttaagtaacaagtgtttagtttcataaaccgtaatttctgatctgattgttattgagtctctgtgtggttgaggtttctaaaaattgttttagaataaaaatgattttagttcaaattaatcttgaaaaaagtgtgtttagtttacatcatgaattgattttgactgtagtcaaacttgtttttataaaaatatatatatgtttgtttaaccacaattaattttacaaaatcaattttgtaatctctcgtccaaactcaacacatgtaatttatattttagatgtctttattctacaaacaagttattagtgttaaatattttattcactgcaaagattacttaaaattattttaattctaaataaattccttgatgtaaaactagacatgtaaacatttacttaaaatcattttatagtaggtagtgtttcaaacttcaaagtgattctggatatcaaacatggaatgatgatgtgtgaattgtgattgtttgtgttttgttgcagt

SEQ ID NO: 639 - DNA, 242 bp, Glycine max
  source 1..242: mol_type = genomic DNA
ggtatcaatttcccatgggatcataggttttcttttaccgattttgtcgatgactaatcttggcggcaaattaagtctttgtttaagggatctgagtccagttccatctagatcaacataatgttggtgacattggggggggggggggggggggtgttggcatttaggatctgttacaatgtaaaattattcttaattcttaattaataaaatgttaatgttgttgggtttgtgtgatatag

SEQ ID NO: 640 - DNA, 622 bp, Glycine max
  source 1..622: mol_type = genomic DNA
ggtaattgatctcaaccctgatctcaacccagcctcttgatttttgtttctttggtgtgacttgcatgttgggattgtgaggtttgtagatatgatgaaactattgatctgtgtttgtcgtttaacttggtgattttgtgagttacagatcatgtgtttatctcaatttaaaaaggattgcatgagcttcaaactaatccaaattgggcctatgtgtctttgtctgttagtttaagcttttgggatggttggatcatgacatggtaccaaattgatccatgttgtttccattaataacaaacaatgtcttatcccactaattaagatcggctacatggataacacgatgccatttatagctcgcttaaaaactaaagcttcaaggaatccttgttgtttccattattctaataaaaataaaataaaaatttcaatacagagtaaccattgtagcctattgttggatgttggatggtagtaaggagaaattcgtgagaatatgttaaagtgaaactttttgttcagtttgttatgtgtttgtatcatgaatgttatctagtaaccatttaatggcttggtattgagatgagttgatgtggtttttctatggtgtttgttgtag

SEQ ID NO: 641 - DNA, 305 bp, Glycine max
  source 1..305: mol_type = genomic DNA
ggtaaactgcatgactataattacatattcctgaagcagttgaattttggaatgttaacgcagcaaataacttcggaaattatatttcaataatgagtaaaacctttaatcaaataaacattataacaaaataggaggaaataacaaacataatactcagctagatcaagagaatgaactagtctaaaatatatccttcttttgctgtgcttgatgggcgacagagtaagtacttgctgttaacgattgatggtaacaatgtagttactgaagctccttttttatgttttctttcccttgtgtag

SEQ ID NO: 642 - DNA, 159 bp, Glycine max
  source 1..159: mol_type = genomic DNA
ggtttcataatttctacctaggtttcaaagggaatgtttatcattttcattcttagtgtcccaggttgttggatattcactcaatttccccctctttgcatgccccttttcttgttacggaatggtttcaaaggattatttctgcatttgctgctgcag

SEQ ID NO: 643 - DNA, 837 bp, Glycine max
  source 1..837: mol_type = genomic DNA
ggtttgtcactacttgctaaagcattttgtaattaacatttatttgtctaccattggttgactttgtttgtgtctttgttacttccatgaatcttctctatacttcagtaataaattattgtaaacttgtatcatggtcatccaggtccctgattttttgaagttgcaaaatctattcgtgcactttccaatgtaaatttgtgatatggattaatttaggcatacatttttcaataacatctaatggttcaaattcaatactagccaacttcaaactaaacagacactaactcatgctcatgtcatgccactacatggagaagattttgtactttggtgcagtgccattgatgcagtggtcaatgtagacaagtgacaccacaaaactagtgatgagttttttccccacattttatgttactgatgatgatcctgcaatgttgggcaacatgcccttataattgatgtctataaatggctctggtatttattgaagcactggcactagataatcttttaaaaatattgcttcacaaatcatgtaaagtcacaggccaaacatctatatgtgctcaatatttatttgttttctagaactagagatgcctcggatggtttggcctgatattggcaaccttctaatacttaagcagttctatgcagaagcagcagaacttgatttatgcttttcaaatgactttacaagtgataatcctgacaatttgctccatggaatcattatcgacttttttgaaacataaaggaagtcttaatgggcaatatgctataagtggtaaagtcattgtttaactaatgtggttgttaataactggccag

SEQ ID NO: 644 - DNA, 368 bp, Glycine max
  source 1..368: mol_type = genomic DNA
ggtgtctttatcacatctttgccttaaaacatcctatcagtttcttcaatttcctctcttcctaattgagcatttgtttaatgggtgtatctgaaaaacatagaggattgctgacatgatcgtctaaatttttcacctgattcatacccttagtttcaactaaaacattaaattgtacccttacgagagaaaattgaacaggattgcaccttttagcgtatgtcagcctaaaattgcttataatacagtggtggggattcctatttgcctttgaaattgctacgtataagatgaaattttttggagatttctccagtattattttttaatttctcgtgtattaaatatatttccttacttttatgaag

SEQ ID NO: 645 - DNA, 273 bp, Glycine max
  source 1..273: mol_type = genomic DNA
ggtgagatcattgtgtcattttttcccccgaaagaatgattttggagcatcaaagcttttccataaatttgtgtcttcacttgtgaatatttctgttggtaaattgttgaactggaaggcatcagtggggaaattatgaattcatctcactttcttccccccatttttaacttctgtaatctgattgggaaatgcacacattgctaaaaaatgtgatttttcctgtaacacttccagataattattgaaaattttgatgttatttccttgcag

SEQ ID NO: 646 - DNA, 77 bp, Glycine max
  source 1..77: mol_type = genomic DNA
ggtataatgactgcctaaacagataagcattcaaattgaatgcctttgtgctctactgacaggtatgttcctggcag

SEQ ID NO: 647 - DNA, 462 bp, Glycine max
  source 1..462: mol_type = genomic DNA
ggtaattagaaatagttacgcagtatttttgaaataggaggcctgcctttgggacagcaagtgtatttctgtatttgtgaaataggagactttttgtctctgggacaacaagtgtattgctttattttgtgatttcagtgttaaatattatcttttatttactcttatcaattggtgttctgtcatgctgtcacataaaatctttagcactatactttaatgaaaaaaaaccttgaaaaattaaaagaagtatttctttcaactaaaattaaattaaccttcctctgatgctggcagcttttctagttttttttactgctatttgtaatgttataaagttttcatcatgttgcagcttgcccagattgacttgtgatcgtgaagtatcatgtttcttgtatgaaaatattttaagagttctattatactatgtcatgattttgtctttctctatggatttag

SEQ ID NO: 648 - DNA, 99 bp, Glycine max
  source 1..99: mol_type = genomic DNA
ggtctgcattctgtggcaaaacaaattaaagtggcagctggtgaatttgtctcctttatattagttttaggactcaatctgatctttcttctttcctag

SEQ ID NO: 649 - DNA, 203 bp, Glycine max
  source 1..203: mol_type = genomic DNA
ggtgggactctcatcatttttctttcagtctttcttttgatgattatcttacttttctgcttttttttttatctgattatattggagatagatcaactcacatacacacacaaacactcatattgattaaaatgatttttgttctgaggttaaaaatcaagaaattgggttatgaaataacctattggtgctgcatttggtag

SEQ ID NO: 650 - DNA, 126 bp, Glycine max
  source 1..126: mol_type = genomic DNA
tgtaagtgtgatagtttcatatggatatctgatatctatctgcatttgttatatacttctttggcctgtagcatcttcatgtaatacctgtcatttcatgtgatgacatcaataaaaaatggacag

SEQ ID NO: 651 - DNA, 76 bp, Glycine max
  source 1..76: mol_type = genomic DNA
ggtagattctctacaaatcccttgtaccattttaagcacatattgcgtattgctaattttttgctctcttatttag

SEQ ID NO: 652 - DNA, 650 bp, Glycine max
  source 1..650: mol_type = genomic DNA
gtgagtcttcaatctcaagcatcgttagtcttacttttttcgatttttgattcagatctgtgctgtgaaggcttgtttcgtgcatttcgctgttgacatttgtatccgtttctcagatctaaggaaatttgaacgttgtttttgaaatttcagatgtttatggtttttctcttagatccgtgcgttttgaactctagcttgttggcattgtgtttgaaatctgatcatttttccgtttattattactatagatccgttctcttactattgcgttttcgcagcttgaaatcacatttttttccgtttgtcctaccagatctgttttgttagtgcattttctaaatcgtttatagagctgtaacattttgtaacctggctgctttatgcttgctgttcaacttaaactgtgctttcgttttccgtgttcggatctgtatgagtagctagtgaatcatttttattagatcgttctgattaaatcgttttgtttaggggttagattttatgtttatgcttctggagttgttggagtaattgctcttcaatcaaattacgaacaattacgtatactgtttggtgaaatttttaatgtgattttgaaaaatgtatttatggaatgctgatgtttagaattgctatttctgtgcagc

SEQ ID NO: 653 - DNA, 99 bp, Glycine max
  source 1..99: mol_type = genomic DNA
gtaagtcactacatttatcatacgtgaatttctaatgtggggttattaatataatttcgttatacctaacgtgttatgtttgtttggtaccttatcagt

SEQ ID NO: 654 - DNA, 116 bp, Glycine max
  source 1..116: mol_type = genomic DNA
gtaatgatatgcataagtgaatgtgatttcttgcaatcatttgtgattaatatcaattaacttgatttactgttctttgtattaattaattaatgtatcttttgttggtgtttagg

SEQ ID NO: 655 - DNA, 580 bp, Glycine max
  source 1..580: mol_type = genomic DNA
gtataacttactctaacttcctctcgttgcgacttttttttagggttttgtctttgtttttagggttcttgcgtttctgctattattttttcgattggagtttgtttgttagtgtttgagagttgtttgtatggttttgagtgtgaatcgatggtctccgtggtgtttatcttgtactgttgctacgaaggagtgaagctaaagtgtatgtattatttagcatgagtcttgatctggaaaatctcgtttgattttactggttttgtagtatagtaatgtttgccgttaattggttgttctaatttttgtaaggctttgttagcgttgttttcgcctgttctgtgtattttgaaaataaaatttagttgaaatggcgaggtgtgaatactagttatctacattgttcattagtttttcatttgttggatttgagtgaagatatgcttgaactatgtgagttaaaaattgccgaattgaattatttccttgcgagtgtacgagtaatactgacatttctgtgctctgttgttatgtttatgagcaattagcgtgctaaaagaagtttgcgtgttttttcagg

SEQ ID NO: 656 - DNA, 96 bp, Glycine max
  source 1..96: mol_type = genomic DNA
gtgagttcatctcaccaattcttttgcctgtgatgctttttcatctctttgattcatttactgacattgtgcgtttgttcttgtttctgaaacagt

SEQ ID NO: 657 - DNA, 83 bp, Glycine max
  source 1..83: mol_type = genomic DNA
ggtacaatttatctgtttatgttaccgttaccctttcaacaattttgttctcacatcatattggggatgttctcatgtcacag

SEQ ID NO: 658 - DNA, 113 bp, Glycine max
  source 1..113: mol_type = genomic DNA
ggtatgcaaaaaattcaattttgttcactacccatttaccacattcttcccaaaatcaacatcaagcacttaaatattctaactttgttgatactgtacccattattactcag

SEQ ID NO: 659 - DNA, 89 bp, Glycine max
  source 1..89: mol_type = genomic DNA
ggttttccctataatttgacaattttattttatactccattttattctgtcccctacccacctttttttttctttctgcatgcatttag

SEQ ID NO: 660 - DNA, 91 bp, Glycine max
  source 1..91: mol_type = genomic DNA
tgtaagttatggcacactttgaggctgtaatttcatgttacagattgctaatattgatttttttccctcttttgttaaaaaaaaaaaaaag

SEQ ID NO: 661 - DNA, 958 bp, Glycine max
  source 1..958: mol_type = genomic DNA
ggtatgtggaatgtttattcagttacaattcaaatgaatgaactcataactgtttgtttgtatgatctgattttgttgtttgttgtgttactgtaattttgttgtaataatgtttggacctgtccagactttctttggatctgtttaagcatgggactaatattcccctttcaaaccatcgcatttctagtagtgtgaaatctgtggcaattatgttgtacttgatttgataaagattttgagctgaagataagtgatgagctgcagaagacagacatgcagacagacaaatatattattcattaaagatattgtaatttgattaacccttttgggaataatcacatttctatgaaggtcactgctatttttgtccttaatataaataaacaatgcttaactgagcttttattacttatatgatttgaagacatattcaattcatgtccttatgatctcatgaagtttgtcacttcactcatgtatcacctagacaattcttatttccatggttgttttcttctaataaaagtcattttaaatgaaaatagagtaaaatctagcatgtaaagctggtttaaataaaaatagagcaaaatctagcatgtaaagctggagagctactgaagacaaaagaagcaaaataacaggttatccattgagagagtatgatagataagttttgggaatgattctagtagctagttattcattgattctatgaacatgttaacaaggatgaattctatgatttctgaaaagtgaaaagtcgatttcctactctcaggatcaggcaaaactaatctatttggaaaattctatcaaatatttatgaagttgttattggttttttctaggattactatttgacaatacaacttaagcccaagtaactttttttcttaattaatagtattaattaattaatactatgactttcaatgtacctgatgtgcag

SEQ ID NO: 662 - DNA, 1665 bp, Glycine max
  source 1..1665: mol_type = genomic DNA
ggtaagaagaaattggtctctttgcattttcctagcactttcctggtttcctttatggctttggtatgtttatgtcaattagcttagcatttgattcatctatgtccattttaccaagtatctaatatgagctggaaagtatctttaatgagtattatttgaacaacgtaatgttagagctgatgcattaccctatcttgttataaagtattacaattattatatgaaaagtcactttaagataatttttattgtttttatttttttagtgacattaaattgaaacatgttattctcttttatcttctttttgtcccatcgttgtttggtccttgtgtttgctttgttgcttttttttttggaactgaggtcttcatttagaagtgagaagttggaatgttcaaattaaaacgattatgtcacatgagcaatgaagtgttgatggtagcatgaataatttcataagcgagttggtataacagtaacactgatgaacacattaatcctgtatgttccatgcattagtggttattgagaggttggcttcctctcttttacatttttattcaatgaaggggactgcttctgattctgttgagtgtaagcaaggaatttattgtgatggtgtagttgtttatttggattgggaccatggtgtaacaaaagatattggcatcattttaacgataagttgctttctgagtgttcctaaaaagagccattatgtgtttttttcctggtcaaaactcactgagtcaatgttgggtgcttcagttgtactgtagatctgtattaactgtgccccatttagatgtaagaaatgcatttattaaatgatttagagctgcataattttatggatctggaacctcatttgttctccatattttttcttactagttttatgtcttggtcaatggacttgttcctttatttgttattttcaatcacagtgtgaagggagaggtgcaagcctgctattaatttcaatatttgagcatttctttttgctttgtttccattaaatgtcatcaggaatttaagaatttaggacaggtataaaattttcacctgaaattatgtatctaagcacctcagatttcaacattctaagatgcatcataactttactataactgtcttggagttggaatgtggttagacaagttgctgaaaacctgcatgaactcaaattttaaattgatggtcagatttatttttttaagaatttgatgttcacttgttttgttttgctgtctccataagttcaggctcttgaggggctatctatgtgtacttcaaatacataggcggctacactccctgtatctttctcaagttattgttgcccagaaacaaagaaactaaagaaatgtctgtattgcaactagttctattgatcatctggctttttctgattgtgaaaaagaatatattctacataaatatgaatggggtgtgctgtctctctaatctgagttcaatctatttgttgtgtgaactaacagagcatgtttagctttttggttctttgtgatccattataagcattgtagatgtacataagaggacatggcatttaattttgctttggtcttaaatgctgtgttattttcatattaattagcattatgttatgatttgtatacaaattggcacttgtag

SEQ ID NO: 663 - DNA, 938 bp, Glycine max
  source 1..938: mol_type = genomic DNA
ggtacttatcacttccaaactagaatactattggtgtaagtcagtaattttatctaggtgctgtaaagctttttcctccatcacagcatcacctatgggcttctttgttgttgcctgttgcatttttaggttagttccgcatttaaaaaaaaatatacaataagttttcttcataatggagaataatgcagaagtgggggatgatatgtttaattattaattaataaattgtagtaattcctagtgggataaggagttgttgttgtaataaattgtagtaattatgatgtaactgaattgggagttaacacttgtattggtgatttagagatttatcgtcaataatttgggaaattatggtttagttgttttggtcattgaatatctaacctcttttggaatatatttttattttgttttctagattgggataacttgagtctgaagttcgggttgcttgtccaaataatttagggtcctttgagttgcttatataaactattagaaatgggtctaataactcaaccctaaaagctagttcaaaggaagaggattgcccaagccttacaaagtattatggccatattcctagctgatgtgaaacatcttccccctcatgcccaagattgaatagttggaatatgaagtttgcaagactagacatctatgggtggccaaacatcaaagactggacagactttgatactatattagaaacagattagatttaactttactacaaaagctagctcaagggaaagtgttgcccaacacttgtaagaagtttggccatatttctagctaatgtaggatatctaaatgtgaaccatgtcttagagattaagatacttactgtgattgaatggtgagaatgttgagtgtcttcgacattatttctagctctcattttatatcactaccacttgcctattttgcag

SEQ ID NO: 664 - DNA, 137 bp, Glycine max
  source 1..137: mol_type = genomic DNA
ggtatttggaaattagttcatttaaactgtgataaatacttgtcattaatttattttgcatgttgtggttcttttcaaattcttatttttccactcttgacatagtcattttatgtttttgtccttgccacgagcag

SEQ ID NO: 665 - DNA, 655 bp, Glycine max
  source 1..655: mol_type = genomic DNA
ggtatgacctatcttgctgttataagtttatatgatatgatgaatgctggtataaatgactattaatctgagatgatgaacatcatcattgactgatcgtggttatagttgttttgttgctgctgttgataatattttaatttacttctggggttatttcaaactcccttgactactatagatggacactggtatcatcggcaagcctcattctcaaggagtgggttcagtccctcaagattggtatcaagcatgttggtaatgaaaattgagggaactgaacaaatgtgtgttaagcaaagctgttcttgcccttaatttgggtgatttgactgtcatacttttggttaatattttccaaatgaaaccgagtcttactgttggaagttgttgcagcagactttattcaaattttcctagtctcaaactttttgctcttgctttacaaatcctttgagctctaacagttgcgatatctttaatctacatcagggatcacgatcctgatggatgatgaaatataattatagaatggggtgttggagatcaaatactaaaacatttgatcaaataggctttttatacatagaagggaactatttgtcaggatttctcaattagcttctaaagatttcatatggtattatttgaccag

SEQ ID NO: 666 - DNA, 2293 bp, Glycine max
  source 1..2293: mol_type = genomic DNA
ggtaaatgaaacttcggtgtattttattattattattattattattcaacatatcttatttggcactacatttggagttttctattaggatatcttggaagatggaataactcaatgatgtaacattttcctgaacatgaatctagaatttgtctttatggattaatagttctatgatctactactcttaacagcagaaaatttggaagtagattaatgacagcgctgtatgtagatcaacacatcactgtatgtttatccagcacccaggggtggagccaggaatttggtttgaggggggccaaagaaaaaataaacttttacatgtataaaaaatatataaaaagtttaatatatgatatatatatatatcatatatatatatatatatctaatattttttataaagaaaaaatataactatatcaagtacaaaaaacattactacctagctaattagatcatttatataaatataacaaacaaatagatacattttttcttgtaattataaaaaacatacttggttttaaatatattaattatacacttgtatataagaaacaaatagatacattttttatatccttaaattattgtgaattttattaatgagacaatcaatcatttcatatacaagtggatgtattcatttgatttattaacaatttaagtcaatttcataggcaaaaaaaaaattatttagtaatgttattaaatataaccactactttaactattggattatatgggtatttttagaataaaattcaaatttgatatttttaattaaaattaactaacttaactatttctattggttttatttcttttatatattaatagaggtagtataagagaaaaaagataaattagatgtataaaataattttgaataattatatgtggactctgtaacattacaaatatttcattaatgcctataatttctctttatcttactctttctctcgcattatattacctattgtagttacacctttctcatttttctctaattttctccccaagtgtctactaacatggtaattttcatatatcatttttcaatattttaaaaaaaaaattaggagggcataattttttctataatatattaaatacactttgaaaaaatttgggggggaggggtgggcatgtgcccccctccctccgcctctgccagcactgcctgacagtgtggtagtagattaattacagcagaaaatgtatatatgctccctgaactttacttcattcgttttgaagtaaccaccctcaactttcagatttggcagtgtggaaaactttgttgtaccatcagcagtaaggaaaataacatttacttttctgatattttcaatttttgaaagtggtccttaaattttctaaaatcctacaaatgacactcttgggtgacaagttgatagcatgtttgataatacgccaattcaaaccatacacgtttaatttttacgtccacagagaagctactctgtttagcttttatttttcattttttcagtaaaaaacgctaatcagagtctcttagacgcagaaccaaacatatactaagttaaaaccaatcgcttggttgctttcatgtgttgattaatatgacaataacccttccttttctcagggtagtgttttgccccacttgtctgggctttccttctcctgaaaagtagaagctcctccaagtagctttcatagaagctttatttttgggattttgttcattaaaaaaaagctactttatttttaagagcttttgtaaaatcgtgcttagcccaacttcttttaaggaaagagaagcgcagaaaatgttaggccaaacactacgtaggtggggttggctatggatcaaataacgctgcatgctgctatcttggattaataactatggttagagatataacaacaaaaacaatttttttcccactatgtgaggttgtctataaatcttatgttggccatggtaatcgtaacaactaaatattgttgattgtgacgtttgttttaatgatttaaacttctgaccagtcattgtattttctttgtgacttcagtaaaacaaatatggtaaaataatttctatgactttgacactagtaatattattctgaatatagttttgctattggccacatatatcaactttaagtattagcttgtgcctatttattaactgttgaagttgagttctctgcatagatgatggtagttcagattgatatgaaaaacacaaggtcactaatcttggcatttaaatttgtctcttgttgctcag

SEQ ID NO: 667 - DNA, 1159 bp, Glycine max
  source 1..1159: mol_type = genomic DNA
ggtacaaaatagtttcatatttctacccatttttactgatgttttaaatccttaaaaacttggaaaatatgcacttactgacatgcttgatatacctaatatttgattttctgactcaaatttttctttaagtgtagcaactatgtgattttctttccacctgtgaccgtgacttttgccatgtataaactaaactatattggtccgaacaaatggattaattgtgtagtatattggtccgaacaaaagtattttcttagaatttgaacttagggcacaactcaatctcacaaaaccagcttgtaaagtgaggactgtgcaaacttttttagctctattttagtcatataagtcgctgggactaaacaccacccttgaggtgacaattaaggaaacccctaaagaggccacaactaagataggctaggggtgaccacaattaaggaggctttccaatagtatttattctatgaagtattgatccaaacaaaagtcttcagctagcctaggcattccaaaaaagacctaaatggtgggggaataaattgaactatgattatgagttatacattggatgaaagatgtacacgtataagaacttgagttacaacaaatatgtattacaaccacttttaaagctttctataaacgaaagagagaaaaacttctaaacagaaaatgaggaagatgataatattcaacccatccaaaaaacgattacaactctagtatatatgctagagctaggacagctgtacacagctgttattacaactgtcaactaacccaaggttagttgagttaactgtaaaggctaattatactaaactgaaataaaagaaaggagtaattccactctactactcttatacacttacctaacattgacttgtataatccaattgttaaaaatattcagcaacacaccctctaaatcccgtgcctcgtgtaattaaagaaaactgtgcttgtcaatgtatacggattctccattatgtaatatgttgctattttggctttttcaatttgctttagtatcaagattttcatattataattcttctaattatgtagctgaccatattttgtgtgttccaaattttgtaagtttgtggtattatatgatgtcattatttaaataaggacttcatactttcag

SEQ ID NO: 668 - DNA, 1161 bp, Glycine max
  source 1..1161: mol_type = genomic DNA
ggtgagttctactactttatctcattttgttgaaacaatacattattttccttgcatcctgttactgagtttgcagacatctccctgagtaatttagagctcaagcttattgagtgcaagctggattatttaatttgtaaattagttgccgcacatttgtgcccctgtaaatatgtttatcttgtttctaaatatcatgaataattttttttatatagtactatttacaaatttcattcctttccacttgtcattgggaacaagtaatcttacagtttcaaggtattttttgtgtacaaagtaaattcagattccaaacaactgtttaaatctatttgaattgattttgtcctatggcctacaaaaaagtaagtagcagtgactaaacctatttcaaacattcttaacaccttttatttttttatttgtttctgttgtagagtctaataattatttaaagaattcatataacacatagcttgagtttgaagcaaaagggagaaagtagcattttaaaaaaagttggtttctcttctctctctctttggtccatctcttttaggctaaaagaatgaaaactgtcaaacaactcttattttatttttaaatctcttattttgagttctgatgtaaaagtagcttctaagtaacaaaaaaatgctggacaaaatacctcctagcatgcaatactctttgatgtaagtacaagtgcacaattcttctcaattatattttatgtggagggtctacttagtctgtacactttgggtttgtggtcattttaaaatattacttggtaaattttcaaaatttttgaaaaattacacaataaaatttgaagaaaagctaacttaataatatttaaattgatataaatattaaaaattgtaacataaaatctgcttcaaattatctgtttttctatattctttttgtctctttttaaggtttattttctccaaatgagtttgcccaccctttaatgtttttatattctttataactgccctttaatgtacaaataagccaaaacattggacgtgtctcatgactttcgaatatgcatctcatcatatacaactagtgctgctgctcctctcaagtttttgcttgcttccaaacttggattcattttttaatcatctagtgtcctgtctatag

SEQ ID NO: 669 - DNA, 92 bp, Glycine max
  source 1..92: mol_type = genomic DNA
tgtatgttcctccattgaatgtttttcattttccctcacatttttcctttgaacaatggtatgattgcaaagggatgatgattattgcacag

SEQ ID NO: 670 - DNA, 91 bp, Glycine max
  source 1..91: mol_type = genomic DNA
ggttagtggattcatgaatttctttctgtgctgttagcatgtttgtgaacaaattatatgtttacacaattctagtggtttcccttgctag

SEQ ID NO: 671 - DNA, 76 bp, Glycine max
  source 1..76: mol_type = genomic DNA
ggtaattttgtcctttttttcatttcatacacataattttgaagccttgtttaactgctgggttttgtattcacag

SEQ ID NO: 672 - DNA, 88 bp, Glycine max
  source 1..88: mol_type = genomic DNA
ggtgagttttacatgttgagcttggtatataattatatcttaatattacatgttgattggaaggaattgacacatttttctggaatag

SEQ ID NO: 673 - DNA, 721 bp, Glycine max
  source 1..721: mol_type = genomic DNA
ggtttgtttcaattttgattcaccttatcatattaacctacctgacaacaagttaatttggctatgatactgatatttgcaatgatagttcatgtattgtttcgtattaaagaaagaaaaagtagttgatgggatcaaactacattgataagggtttaattcttactagtgcttattcatttgtagatcatcttcctgaccttgaaattggaaaacctacccccgtcccccaaacttctttgtacccaaaagaccaaaaaaaaaaaaaaaacctgaaatcaccagcatccttgttacttgttagtgtgatattgtagacatattaagcaaatcaatgaattctgtctgtaattatgttacatattggaacgaaaacataatctcatttaatgacctgaagttttgacttcaacgttaatgtaattttttttgttttctttctttattatttataattttaatgttagatttgacttcttcgtaagctatttttcttttcttcatcctgttggacattatcccatttttccttactttttctctaaaagaactgtacgtttagcagtgaccatcattttatgctttttcatttttcctcatcttgttttaattagttctatttttcatgtcgaatttcaacaccatagtgtcatgaatgattctgttaattatgtcatgatattaagctgatggatgaatccactattcttttgagtctcag

SEQ ID NO: 674 - DNA, 1056 bp, Glycine max
  source 1..1056: mol_type = genomic DNA
ggttagtttcatatcctataatctaatgattactttttaatcatctgtacttaaaattataggtgtgcgtacaaatctgatccaagtggcattgctggccattagcgctccatataattgttgtaatgtagtgtgaataatcgatccataaacattgataaaagataaaaaaaaaaatggtctgaagtagtggctttgattggaaaaagaggtgaactagtcaggtgtccagttcactcaacccagcaaagaaccagtaaataattggctgaaccagtctagaactagtgaaactggtggtaaacctttttcaattttaatataaccagaatcaattttttagcaaaataaaggtccgatgccaagctacaacgaaagttcagccttaagaggggtatttgttggattattattattatttagtctcttattattagtttatctttaaaacatagaatttgatctaatttattacttaatatattatataatgttaaaaaatggtatttaaggcttattatgtttgtagtccctataatatacctgttttatgtttttagtccttataaaaaatttctatggttttggtccctataaaattttgtttttcagtccttaaatggtatttttttagttcttataaaatcgtaaacttttgatatttgcccctcttctattagaagatattcattttagtccctatgttagaatcattgggtttgttatccaatagatagttgacatgtcatgcgtgggatagtaatagggactaaagctgaaaaataaaattttatagggatcaaagccataagaaaaattttagagactcaaagcataaaacaaatatattttagaaaccagaaacatgtttaagccaatgtttgattattgtggtttggccactttcaaccaagctcaaaccattgaattgtaatagttttttttttttacacatttatgtgaaagtgatagctttaacctacttattttttgttttcttgttaactatttgtctctgattttatgtactaccttttgtacatggtggctcttaag

SEQ ID NO: 675 - DNA, 589 bp, Glycine max
  source 1..589: mol_type = genomic DNA
ggtatgttgaacacttgtgaccttcatgcttggcttcttacttcatgaatttcttcttgttggttattaaatggttcttattgtcactatatgttttttcaattatgaatgagaaatatatgttcatctctttttggatgttaatgttgattcttctttcatggacttggaggaatttgatgtcttaaattattggaaaaataatcttgttaattattcagctttcaaagtcataaaattcatgaatttaaggttgagagggaaacagagggcgagcctagcgaagccaaataaataatatgttttagtagttgtttatttatttatatatgtaaatcattgttattttttaaatacaaattatcaatcaatttcagattcaggtctacggttccagttgattttcaattgtgggatgtggacctttattacaatgtccaagttccacaattgtgggtccattattaattgtaagatgttaaatctggtgggaagtggtcagatattttgttttaaaatcttatacctgaacctgatcatgtataatgtatccttaatttttgcttaacatactgatatgcctttgcag

SEQ ID NO: 676 - DNA, 330 bp, Glycine max
  source 1..330: mol_type = genomic DNA
gtaagcaattttttatttgtttggttagcttgaggctgtatagtttgaacttatctgggaactttgaaattgaaataaacacatgtcaacatccattagcatctataaagtctgtatgttcaacattgcatttccagatatattagaataaactgaaaatgattcatttcattgtgaatgatttcacttgacatattactaaatggggaagaaacacattctgtgaactgcattgcatttggaaattgtgattgtagaaaacttgtataaagcttccatatatcatgtgattgactttataaacttcatttatttgccttctttttgcag

SEQ ID NO: 677 - DNA, 137 bp, Solanum lycopersicum
  source 1..137: mol_type = genomic DNA
gtgtgtcattctttctctctgttttttttgacaaaagttttcatctttttttcaatttttgattgatgatcctatgaacaatgtagcatttgtttttttttgtttaagatgatgatgttcttttgtattggaatagg

SEQ ID NO: 678 - DNA, 101 bp, Solanum lycopersicum
  source 1..101: mol_type = genomic DNA
gtgagtgtagcgcttttgtgtccttatggtgtatagcttcgatctttgtacatttttgcagagcaaaacataaagcctttcttgaattgtggatgtgcagg

SEQ ID NO: 679 - DNA, 112 bp, Solanum lycopersicum
  source 1..112: mol_type = genomic DNA
gtacacacagtcccatcacttgtttactctaaacagacctaaactaaatcctaatcactctcagcttaactaaactggttcaattctgaaactatgtgttaccttgtgcaga

SEQ ID NO: 680 - DNA, 103 bp, Solanum lycopersicum
  source 1..103: mol_type = genomic DNA
gttggtccccttattactctacttcaatcgatgtagtcttatttgaaaaaaatttttagttaatttttgtattgaccggcttgtgtttgataatttgtctagc

SEQ ID NO: 681 - DNA, 92 bp, Solanum lycopersicum
  source 1..92: mol_type = genomic DNA
gtaagactcgatccctaacttttttcatctttacatataggagttatatttgttcatttcgtttttgtttatttgttaattttggtgacagt

SEQ ID NO: 682 - DNA, 95 bp, Solanum lycopersicum
  source 1..95: mol_type = genomic DNA
gtattttatttgtagcatcacactgttttcctattttgaaatgatttgtttgatatatttatgagatggactaaaaaattggttgattctgtagg

SEQ ID NO: 683 - DNA, 280 bp, Solanum lycopersicum
  source 1..280: mol_type = genomic DNA
gtcatctccttttcttttatgttttcttgaatgatgttaataatatacatctttcatctggtgtacgtcgagaagaaactaatttcaataaaataaaaaaaattcattttttcatacccaattaactcatgattgagtatttgttcttaatgaaaattgggtaactgtggaactaatcggttcttgtctttccatatcttcaagaaatgagtgaattataccgtcaattagttttttctcattccataatgtatcctgaattatttgtgtgttcaatagc

SEQ ID NO: 684 - DNA, 96 bp, Solanum lycopersicum
  source 1..96: mol_type = genomic DNA
gtacacatcctgcacctaattcaattctacccttattttgaacttatgatataactcttgatggttgagtctctatttttgtttttctttaccagt

SEQ ID NO: 685 - DNA, 158 bp, Solanum lycopersicum
  source 1..158: mol_type = genomic DNA
gtattggcacatttacaactcctccattctgtaatgaaggtattgtctgcttggggtccaacttttgtggccagagcagacaataccttgtcagttgaaccgtttgaatccttgtatttctcttatcaatgtaatgagttttctaacttctaatcagg

SEQ ID NO: 686 - DNA, 416 bp, Solanum lycopersicum
  source 1..416: mol_type = genomic DNA
ggtaatttggctgttgcttttcgtgcagtgcttttcgattctataacagaacttattttgtaacgtgtggttactcggacggtgatcggactgtgtatgtacttgtgcacggtagcaaagtcacgaattttgttaacgaagtatgtttaactgattatccagtgtgttgtatgtatgtccaacttaagcaggaaatcatgtttacgtcgtaacaacaatccaattttatgtttagatgtttgaagactgatgtattcatcccctgttagaacaaatttttgttaggcttctaagagagaaatgaagtttgtgcttgctataattttgttgattatgtgcagcaaatggcttgaatccaagtaaattgtctgtttctttgatgagcttatgaatgtggactctgtttttgatttcag

SEQ ID NO: 687 - DNA, 157 bp, Solanum lycopersicum
  source 1..157: mol_type = genomic DNA
tgtaagtcgtcttcttgcttagcaatagttttttttggtgaaactttacaattgtgattgtactggtgttaagattctgtaggatttgccctttttatatgattgtattatgctagtatatgtagattaatgtactaactcgtgatgtttgcctcag

SEQ ID NO: 688 - DNA, 574 bp, Solanum lycopersicum
  source 1..574: mol_type = genomic DNA
ccgtttgcctttgcttttcagatccattttcatttccttttcggtaatctaacctatcttcttcatcagatcttgctttatttacttgcttcttttctttcaatttctgctttgagatctgctctacttactcatgttgaatcgctgctttttgttcttctgattactctactgctctaattacttagtaaaacttagatttaggtgtgatattctctttgatttttccagatctgttgtttttatggtcaatctgtcatgaacttgatctgctcttaattttcctagatctactgtgttattagtacttgatctctgcatactcattttggttaccagcaaatttagctaaactttgatggatctttttttttggctgctatacggaaaaacgaagcatgtttttattattacaagtgtccgcctgttgactgagctccaaattgtctgggatttagatatatcagtttacttactaacaagtaaaaccttatatgactagagacatttagttgagttctgaatcgatcttatgatgttgtgttatgtgttgataccttcatgtatatgttta

SEQ ID NO: 689 - DNA, 116 bp, Solanum lycopersicum
  source 1..116: mol_type = genomic DNA
gtagtccttgttcattgactattgtttttacaggaagcacttgtcatttataaccattttaatttaagccaattgcatatcctttttatggaatgatttgtgttttgaaatgtagg

SEQ ID NO: 690 - DNA, 93 bp, Solanum lycopersicum
  source 1..93: mol_type = genomic DNA
gttcgtactgggctttttgtgatccaactttgtctgcccaatgaaataactcactctgttttaattttgacttaatatattacttttgacagg

SEQ ID NO: 691 - DNA, 94 bp, Solanum lycopersicum
  source 1..94: mol_type = genomic DNA
gtgagcttttgttcttctttgcgttaatttttttccagtacaaattacattagctagttggactaaatatttgttatctttgtgcttgatcaga

SEQ ID NO: 692 - DNA, 196 bp, Solanum lycopersicum
  source 1..196: mol_type = genomic DNA
gtaaactctctttcatttctatctagttttcaattttttttctaactagaaaaaagtatggtgactttctattttctcgtgtaattatgaaatccaatggaagtttgtcaattatttgtggttaaaaaacaaaagatgattcaaatattggttgttgttttgatggtagagtacttatgttgtgttttattataga

SEQ ID NO: 693 - DNA, 1433 bp, Solanum lycopersicum
  source 1..1433: mol_type = genomic DNA
ggtatataacttattatgttcattgtatgcatcagttgaagtagtatacagcgtatataccgaatattaggttttgacttgcgtgttgtgctttaccttagattgtcttttttcagtatatggttggtatacaaatctgtacacacataattgtaggaggagcaatatatgaatagatagtgctgacaattgtgtagaactgttggtttgaatgaagtgatatgaaacaagagatttgtttgtaaaagataataatttccgcacataggttagcgagcaaagtcattttcactgtttcgtgagaagtaaatcccttgaacaaaacattttctattatccaactaaacgaacagataatttcaaaacattttgcctggaacccaatgtgccctaatagtgttatgcggttcaagttcccgccgttcttatggttttacctgttaagatatatgctcatctgaatcctacctttttttcgtcacattttggaaggaaaaaacataggtagcatttaagtagaggttttgtaggttcagcgtctcttttttattttttttgtttattttgaaattaaagctttttgtgacaactttgttttataattggtttaaattgagataattttctgtagtttatttattccagaaggaaattgatttcttttttttctctcgctgtggtggaaaatgaaatgcgaatctaagagaaaaagggctaacattaaattaccattttaaatacagagatacttaggtttgtctgttttgtgttccgcataaaatgcaagaggtgatagatacaagtgacaactcagataaggattattggttagatcatgtagtagtgagttgagacagtttagtcaagttattctatgacaattaagtttaatgactttgaaatctacacaggaagctaaatatcccttcgaattgcataccaaagaagcatcacattctttaagtaaaacatctgtctgttatcatgacgagcctttttttattcaaattatggtccttattggttacaccacaacactacttgttttacttttgaaaagttatgtgtttttttttggaacttgttgtgctgaacttatcatcagttgatagatgtgctgtttctaagaaattaatttgaggagcttgaaactggacggtctccaaattatagatttgattctttcattttatgatctgatttatgctacctagtttccatggatgtttacacatgtacatacaacactatcaatgagccacatgcttgtgaatggttgatgtacaggtcctcatccacttacgcaaaaagttctaatttgtttttacacttgcttgtgtgatttagtgcttgtgttttcatcttaagaccactcttttatacaacatgaataacctacattactttatagtgatgaatatttaatgttgcag

SEQ ID NO: 694 - DNA, 528 bp, Solanum lycopersicum
  source 1..528: mol_type = genomic DNA
ggtcaatttgttttcttttaaatctctgtatcagtgtattatagaaaaagatcaatcatgtgtaggaacaaatcaatgccataaatgtcctcagctagtttctggactaccatttattaagattgctatattcccaaagatgctccaccaatgttacaggcaatacatgcactatcagtgttattttagtggcctggatgtcaagttggacgaatgagccaagctcataataactgtgacttatcctgactcgtaaaagtatatatccactctttgaccgccgttacagttttgattcaagatattttgattgggataagaaaaccagtagatgtcatcaacttcttcatcaatccacttccaatactattctgtatgttctttctgtgatgttcactcgacttgcacctttgtagagtctttattcagaaaataatcttgaagtgcttcatggacctttcattttgttgtcccgagagctttgattagcagtttctgaataatttggtaaacccatttttctaccag

SEQ ID NO: 695 - DNA, 111 bp, Solanum lycopersicum
  source 1..111: mol_type = genomic DNA
ggttgactccttttattaagttggttcagattgtgataacttcagtagattgagtgtctcggaattcagtgtggatttatattatgttgctgatcactgtcttcagtgcag

SEQ ID NO: 696 - DNA, 1054 bp, Solanum lycopersicum
  source 1..1054: mol_type = genomic DNA
agtaagatatctgttcttatctgtcagtgtttttgtaatgttctaaatgttactgtaatggtgactgctgattatctttttacttttgcactctcatagtatctcaattgtctcacaattatttatacaacttaagtgcactaaaaaaaacttagccatacaaggttgctcctcacatgtacaaaatcattattgaacccttcaaagtctctcctattcctctctccacaccacccacataagagcctatggggctgtatcctatcttttggtattctctttcttcgtttgaaagcacaaatatgaatgcatcctttacgatttatagtccattgtatcctaaacaaattctgaacattcccaaagtactagctgacatatgtgattcttttctttctcaaagtctcagctgacaatattgctccatgaattgttgcatagttatttttattttctatagtgggacctgatatcaagagtaatatcactttgttttattgttttttctgatttaaatatcttgccacggtctttgacatcttgttttttgaaccatctaaattgtgtgcttgtggatatcaagatactgaagcagtaagcttttaacttattgggggatgggaaaagaaaacgttgcctgattcatgtgttccccatgaaaaaaacagatctaaaaatatgtaattctaattaatggagagcagtttatcttggtgtaactgattttgtgaagtcattttttcccccactattatacccttatatcttacctgttatcaagaaaaagagaagatgataaattggccatctcacaaataggtagttatttcttcttaattccactagttcattctctatttgtgtataaaaagagaagatgataaattggccatctcacaaataggttagttatttcttaattccactagctcattctctatttgtctattcttttctcttttctgtttcctagtaaaattgtaacatgcagcttgtgtgtggggcattcagtagtgacaactgaagcatattgctaataattttctttttgcag

SEQ ID NO: 697 - DNA, 74 bp, Solanum lycopersicum
  source 1..74: mol_type = genomic DNA
ggtctgtaaacctgctctccatattttcctattgaaagcttttgcagatatactcaaggaatttcactttgcag

SEQ ID NO: 698 - DNA, 500 bp, Solanum lycopersicum
  source 1..500: mol_type = genomic DNA
ggtattcatgattattgtttaacaacttttacggtataactccttttctttcttcacttgtgctacagaaaggtctgattgtttgaactttgaaatttgattgaaattttgtttcaaactggaaggttttaagcagattctaattctgtctgtttgagaaaggcacaccacatgagtcatgattttggaacttaaacaacttggttttatgttgttatcatgtaatccttaacttgcattatttcccttgaggagttctaagattatttcagttgcaactaagacctagctttatcacccaaccacccaaagggacattgtttttccattttatacatctagattcctttgtagtcatgaatcttggggatctagaatcatattatattgctcatctgttagccgtttcccaactttgtaagctcggagcatatatcaagacaacatatgcacacacataacctcactacttcttactcatttgatgttttgtgaatcag

SEQ ID NO: 699 - DNA, 82 bp, Solanum lycopersicum
  source 1..82: mol_type = genomic DNA
ggcaggtcttttggccataatacattttgagatttagcttttcttatcctacttcttgactttgcattaccttcctttgcag

SEQ ID NO: 700 - DNA, 576 bp, Solanum lycopersicum
  source 1..576: mol_type = genomic DNA
ggtaagatatacttctactgtgtacttcttcaatcttttgtgctgaaggctgttaatctgagctgtacagcttatgaactgcttaaatgactttcttagagattaaggatgtatagtaatgtaaaagtcaaagcttgatttcgagtaattcagcttaccaacaaatcaagggagtaaaattgtacttggataattgagtttaacaacatgaagtaatcgtttgttctgtgtttcgaaactgatgcttgatccattagatgctgttgctgaatccgaaggttctacatagttcatagtttgagctttaataacagacctattatagcataacttcttaaagttgaagacataacagatattggttacttatgtttgaaaaacacatttcttgtaatgggcaaatatagtctatatttcagttgctgatatataatgagctgaggcaagctagattagtttgactatctggtcttcacgttcagctggaatcactttcctgaatgatgtttggaccttgcaaagctgtttgtttccttaaagatgtgtaatagaactgtgtgttttccaatgtatcag

SEQ ID NO: 701 - DNA, 1327 bp, Solanum lycopersicum
  source 1..1327: mol_type = genomic DNA
cgtaagttctgtttcaactctgtctttctgatataggcagctcagtgtatagtttagttattggtaagtcagtcctcattcttcccctggatttggttttgtgtctagcttttctgcttgcatggctaagaaactgataagtaaaacagaatagacatgctctatggtttctgcaaaactgaacctgaaattctttcaagctaaatctgtcaacatctataggaaactatgacatgctttcttcctcagtactgtatttcctttctaaacctgctttgaattgtttcacttgagctgagggtcttctggaaacatcctctttgccttcccaaagtaaggagtaaggtctgtgtacacaccactctccccaaaccccacttgtgggattacattgggtatgttcttgttgtattgttctattactatacaatgctatctatgtctataactgacgtccaatgtaatatttgctgctgatattctatatctaaccaattacataacaaaataatattgtttgccattgtaagaatgtacagtctttagagaacaaaagagaacacttggatatatgaaatgtatttgatgacgcctactaacagcgtagatttactttgtcattaggtaattttcctcaagtaatatatagaggtgtatatgttatggagaaacaagtagttaaattcgaaaagtaaagtgacacttttttcttttcagttggtccgaaaaagaatgacatcttttgatattttgctaaaatttaacttcaagcttcccattttactcttaattgaaatgttttatagccacaaaaacttctatggcttattctataccacaagttttaaaagttctcattttgttactttaattccgtgtccagtcatacaccttcacataaattgggatggaggggagtgagaataaggttttctgaagtacaatactcagaattttgagaatagaacagtgtcctttgtgatattttgacttgtgggcatgaggtgtaaagttgaactttaaatactatgcttctgtgaggagttaaaatccttagctatccctatataggctcaacaatttgaagaaaaaattgcatcagtttgtcaatatcacatatggatgtttgtcctatgtcccgtctgggctttgtagccccagctgagcttcttgcttttcttgttcaacaaggaatgatctatccatgcgggagtccaagaaccctagctttaatctacatgcactttcctgtaaaagcttttgttggtttcatttatagtgtttgctataagctttttcgtctttaatatttacgcataatgggcag

SEQ ID NO: 702 - DNA, 98 bp, Solanum lycopersicum
  source 1..98: mol_type = genomic DNA
ggtaagtgctactgtgctagtactagtatactagctattctgtgttgccagtaatttcatgtgctgcatcaccaatatgggctaatctatttgcgcag

SEQ ID NO: 703 - DNA, 136 bp, Solanum lycopersicum
  source 1..136: mol_type = genomic DNA
ggttaatgaagcaactatttgatccttcatatccttattgttaactctcatactcaaaagtaaatttgaacttgttctcttagaaaaaaaatctacttttgttatttttatgataacacgagaaatgtgaatacag

SEQ ID NO: 704 - DNA, 261 bp, Solanum lycopersicum
  source 1..261: mol_type = genomic DNA
tgtaagaacatgattaatatccggtcattgaactttattcactatagtaaagtcacaaaaactatatttaagtaacttaatttacaacaaagtctatctatcaaggtgacttctagtgggagcatcggattgccttattttctttctggttatagtgaggacagttcagttattttagtatgaaacaagataattttgtgactttactgttacagaagagaatagtcggttctaattcatctgttttgttgttgtgatcag

SEQ ID NO: 705 - DNA, 1766 bp, Solanum lycopersicum
  source 1..1766: mol_type = genomic DNA
gtacgtttcatctgcatttcattacaatttcaatcgatttttttcgcattttttttcatattgaggtgtaattgatcgattttcgtagtaattattgtgttttcgatccgtagatccgttcatcggtatttttcgcatttttatggtaataatgtttgatattgagttgtaattgatccatttttgtagtaattataatgttttcgatccatagatctgttcatcggaatattttggtgttaattgtttgttgatatgtggaaaatagtatcagaattgaatgagctagcatatttatggattttgtatatatggcatagatattgtttatccatggaaactgaattatttttctcctttttttttatatattgaggtgtgattgatcgatttttgtagtaattattatgtttttgatccatagatctgttaatcggaatattcaggtattggttgttagctgatatatggaaaatagtattaaaattgaattagctagcacatatggcattagatattgttatccatgataggataattgttttttttctttcctttttttctcttaacacggttttctctttgattcctagttccgagaaaaagttataatgcatctgcattttacaatttcaatagccttttctcgcttttttgatctttatatatatgatattgaggtgtaattgatccatttttgtagtaattatgtttttgatccatagatccattcgtattaatcttcccttgttgattatatggaaaatagtatctaagttggatgagcttagaacatgattttgcagtatggcatagatacaagtatccatgaaaacagagttgttctttcttttactaggattttgttggatctgctgagtactttttgagagtttatgtactattgaattaatgtgatgtaactttgtgtgttaactgatgatgtcgtagagttctggaattgctcagcagaagcaaatctaatagtgatatttgtttcaatttgatctgatgatcctagggaaatagaacattacagatgcctttgatgattatcccgtttattctaatgattataacgcactggatttgggggaatatggaatctgaataatgtggtttatttgagtctcattgtagcttttgtgtgaaatagaagctattgagttttatgtgggtaaattttatgaaacttgaagtgcattatgtattatggatcgtgtgcagttataaggcttgcaaaaagctgtacactgtacctattcaacctaataaatgtaaaatccaccaaaaactggtgatggttatatcagttatccattatccatggcaaaccaactttgttagtgtatctcgtgagctgatttaatatgcccaaaatctctgatgctgtgaaacataattctacttatttgttgatgcactgatttatcgatagctataataatatctgtaattgttaacatactattattcaatttatgtgcggagcctttactttgtcatccgtgcaaagagagaatatatttctcggaagactgaaaaaatagaggttcgaagtaataggaacctttgactgaaggaatagtatatgaacatctcataaggtgtattctaatatgtgggactttctgtgttcagcttatttaaacttgtttgttatttacaaatagcgaaaactcgtataaggaataaagatatcagtatcagatgataattttttggacatatacatttcttactgtggtttcgtttttcaatgcagg

SEQ ID NO: 706 - DNA, 122 bp, Solanum lycopersicum
  source 1..122: mol_type = genomic DNA
gtaagctccagtgttttgtactacagcagagttgacctgccatttttttactgatgcttattaccttttggcccattctgtttagaaaattaagagattcttatattggtttattatctagg

SEQ ID NO: 707 - DNA, 205 bp, Solanum lycopersicum
  source 1..205: mol_type = genomic DNA
gtaagaaaattttcattctttattagcataattactttatatgactgacatctctcaactttcttgatgcttctaccttgtaaagatcttgcacttatatgatgctttgtggatatatttacttattataagttacaaccttctaattttgacatgattgttatcaattgagttattacttctaattctttttcttctccacagg

SEQ ID NO: 708 - DNA, 113 bp, Solanum lycopersicum
  source 1..113: mol_type = genomic DNA
gtttgcattgtcccttctgcctattataactttgctgttattttgggtgtctatcctacttagaagtttgacagttactgacggtgttttctgcttctcttattttctgtaga

SEQ ID NO: 709 - DNA, 83 bp, Solanum lycopersicum
  source 1..83: mol_type = genomic DNA
ggtattcattctacatcaccctttcattcaattcttctaccaaattacgttttttaattccaaatttttctcttattttgcag

SEQ ID NO: 710 - DNA, 8868 bp, Solanum lycopersicum
  source 1..8868: mol_type = genomic DNA
ggttggtactcgtatcttaacaactttgttgcctgttgtttcctggaggagctcggatattttctggtattgatattcttgtgatctaattggtctgtaaaattaacttaaccttgttcaacataccttttgcttcacaagtagcgttcttgactagaatattatcagaaagttaattgtgtaatagactatatcctggatttttttcagaagtccggtattgctttaatttctcacattattctgactaacttcaatcatgtattttattcataaaatgattaagactgaacaaattgatgtgctcagtggaaaggttgttatgtttctgagattcagattgttgcctaagtaatgagagtataaactctgaaaaagggtgcctgtgtcttgtacaattgctaatttaggatggtgctataaaattagaacaaacattggcagcatgattccatggcctttatttggaacaatttccgtaaagtgatgtattgatgttagagtcctagggtcaggtctctgaagtgtgtatgtaacctacttacttataaaggtaatttaccttgaaatatgctactaatggtgttattttttggtgggggtgggggcaggggttgttttccccgataaaacttgctttcatttaatttaaactatcaaattgttaaatggtagcaccttatcacctttggtgagactagaagaaaggaactttgaaaaataagttgatatgctattttagggaatattgttatgttagccaattttggggaaaacaaacaaccagggtccgtaggaggcaaaagttgattactggaaaagctttagaggaagaaaatacaatagagggattgagtggaaatagtttctggtcaagggaggagaagaagaaggaaaaaaaggagctatataaggatatgtgactgttttaatgatatttggctggtgctttgaactgtcttttggagtggaactctttttttgggggaggcggggggagggggattcttgagatatcatgccatttttttttattagtagcaatcaaaaaggagtataagttgcaccaaagggtgtggcgtagttgtcaatgaagtgggttgacaaccatgatttctcaggttcaaatcccaacaaagacaacaaacactagtgatttctttcgatatgtcctagccttagtggatagagctacaagctatctgttgctgggtgagaggtgacaggtatccccagaattagttgagctgcacacaagctgacctggacaccacatttattaaaaagaaaaaaaaaggaaaataagtcaaatcatacttaagaatattaatcaagactaggggtgtacataggtcggttcagtttcatttttatttaaaaaatctaaaccaattatgtcggtttatcaaatctaaaaacaaaatcaaaccatataagtcaattttttcggtttcggttttagtcgttctttgggttttttcggtttttcaactttttcgttttttaacaactataccgcatttgaaaaagcgatacacattttttcactcacgtgtgtgataaacaaaaagtgttaagtgaatagaaattttcgaaaagactgtcaaattcacatgaatacaaaatattgttttttgaaatatcaacgttcattatggtaaactaataagattaaaggatagatgcaagctgaatacaaaaaaaatttacaaagtaaattgttcacttcgaatttgaaaaactataacaatataattataacttcggatcttaaaacacaataaaatatttacaatttttacaagtctaaacttgaaataaaatagataaacattgaaaaccataaactaacttaaaatatgtaacaaagtagattataataatattttttagttataaataaaataaaataatatatatatatatatatatatatatatatatatatatatacacacacaattacaaaattttacgagcccaaatttgaaataagatatataaaattgaaaactataaactaactaaaaattatatcaacaaagcagattatatgtaaataattttatctataaataaaataaagttaatatatatatataaataaagagacacacattgagaactataaactaactaaaaatatattagcaaaatacattataaataatattttttagctataaacaaaataaattatatatatgtatatatacaaaattttacaagtccaaatttgaaataaaatatgtaaaattgaaaatcataaactaaataaaaatatatcaccaaagtagattatatgtaaataacgtattttatctacaaataagataaattatgtatatatatgtgtgtcggtttggtttgattcttttttttctaataccaaaccaaaccaagagtggtcggtttttttttcaatcgccaaaccatcaaaccaaaccacaagtagttttttttttcggtttgatttggttcgtcggttcggtttgacttaatgattcggtctgtacacccctagtcaagacaaaaggattattagtcaaacaaccaaccaaaaggattattagtaaagtcaaacaagcaaccataagtattattactactcatattccaggcccacgaccaaaaatataagattacatcaattaggttcttattaagtaataaagttgatagggagataagtcttctaagaattgacttttaaccttttcttcgttggcctctttggactttgtcgggtccacttcttttgtgtcttctatttgaaagaaacgcaccaaccatgtccaacgaacccaagaagaatgaattttggccaagatcaagatgacttaattcatgaccaactcgatcattttaatgagtctaattgatgtaaactttcatttagtctggaactaaaatttatgtagtaactcaaatccaaggctgtgaagggtacctacagagctaccacctaataggcatgtgaaaaaataatgtggcatctgatgagcctctgagatggccagcgcctagaacactgcccgtcacaagattgaatatttttttcaagaggctattggactcactttaataagttaggtggataaacggtcgcctgaaagtttccccattataatcttatactttttcaactagtttctatcatagttatgaacaaaaactgcatacaaagagagcttctcgctatgttatagatgattggtttcttttatgcagatcctttagtcttatataaaccttgtctgcgggaagtctccctttcactcaatcgaactacagatttatctaaggtagagagaaaatattccacaattatgtcattttagaactccaaatcaacttagcaagattgataaatgaatccttgaaggccaccatcaaagtaatcactgtatgaaacataaaaaagttaagaggttagatgtgacgccctttagggttgatttgacttgcattcgaaatgccttaagccatgtaccgagcaaccaaccatcttgtatcccctaactatatttaaacacataaagggatacggttatcgttgtattaccaatcacatgcactgggatttcttgcggtcccgtaccatcatgaattatgcatttaaaatgtgatgcttaaccattcaagcaaataatgtctctacggtctcatcataagtgaacttgtcttgtaaagggatcaaacattgattttatactcatgacattcactgatacacatctcccatggtgtgcccattgagcctttacatggccaaaaggacaaataaacgctgagacgcagccatgatatgcaaacgattgaagtgaaatgctgaccacaccaaataaaatatgaagtaaagcaaataaggccaaacagtttgtcgagtcagctgcctgtgcagtgtgcatatgccttatacctttttccaaagtgtgtaaccttcagggaatgcaacaaatttacaaacaaatttgagccttgaaaaccagaatcacagtaaattccaaagaaatttgtcagctaagctagcattctggaggctgagttaataaatgggcggatctaaatgctcccaggcacctgtcccgaggtaactctctcccctacttcctggggggaggtctctctttccggcactctatcgccggaaatttcatttccattccttccctttcattatctttcttaactattaccttacgtgatagttttccgagattcagatccttctttcagactttgcaatgggtgacaacaggatttatatcatgcgggttttaagtctttcgacatcactaaatggagcactggcagctctgtgtggttcaaatgggttgagaggagtagaaagatgatgaggagattttccatgagcaacaaaaccatggaatggatctgcttcactcttagagaagcttccagcgatcagaagaaaactatcagaagatggaaaactgcagaaagagaggcggagcatttctgtactggaaacataatgaacatgaaagatttattagtatcatttccatcaataacggtcatcccagaattggccatgaatgcgggatggcacgatataacatttaaaattgaaaggttcattaaatgctctaaaagaatggaagtgccgagacctcctagaataaccacaaccaactactcttatgcaaaaacagttaaggatagtaaatggcaatcaaagactataaaggaggcaggattatgaacaatgctagcattattgaagtcctcacacatgctgaagaccaagagaatgggcttctaaaaagatgcctagtaggccatccggaaggacagatgaaggaaaagcaaactttgcctgagataacagatggtcgtcaacactctggaaaaaggcatttggagttatctgtgaaatgtataaggtatgtttctattcgagttccctaacataaacacggacgagcaaaccctccaaggagtagtgggactggaagaatcacagattcaatctagaatggtggaatccaatggtagcttgtctccccaatactactctgaagatggaaacatgtatcagaattgttgggatcccccttcatctctggtcggagagagtatttcaagaaatcagaaacttatgcggaggttgggtggccacataagaggaaacagaactaagaaatcatatgaagtgggcaaggattctagttgcaaatgacggaagaaacattcccaaagaagtttcaatctccagaaatgtagtacctgagaagatagagcacatggagaagatggagaaatacctagtacatgcctttacacaacagtctgaaggtggtaaaggctgtggtaaagttagtagtaaagcctgtggagaagtacaatccatcagcttagggatgttgcatcagaggaacaagtggatgcagctgtaaaagcaagagagggagtagctttgggccatcaacagcccaatagaaagaggaaactttacaagaatgggcctgacttctcaagtcaagtccatttttaacgacataacttgtaagagcccaataccacttaacagtggtaattttccagaactcccaagctgcaatacaatcaagaaactggaagaacaaccacacaaaacttgaatcaaattgcccaagcgaaggaggagatagtaaacatggtcggggaatcatttatcgaatcttaacgccaattaatagagatacatgataatgaactaaggggggagattccagaaaaagaggataatggttcgatcactctcatgaagaactgggagactgaggaacgagagccactacaaattgtaccaccactatgagattctcagtacttatgaagggatcccctatcgatttctttagtgcagagaggggactgaggcaaggagacctttgtttcctttccttttcctacttgctatggaagggccgaacaatatgatcaaatcagttaaagtgaggggatgactcagaggttttgaggccagcagacctgaagtagataatgtggaaattacccatctacaatatgcggatgacacgttgatattatgtgatggtgaagaaggcctactcatgatgttagggtgatcctagtattgtttgaagggttctctggtctacacatcaattagaggaaaaaccacatctatccaattaatgaagtacacaacatggaagctttaaatgtggttttgggaggggacttggagcactgcctacatcataccttgggatgcctttaggggccaatctcagtcataagaaatctggaacaatatggttgagaaatgtgaaatgaagtgagcaagatggaaatcacaatatctctccaggggtgcaggttgaccttgattaattctgttcttgattaactaccgacctatatgatgtcaatatccccaattccaaaaagtgtaatcactaggttggataaaatcagaataaaaattttttttgcaaggaaaccgggagaggagaggctacaatttggttaaatgggatgttgtgatagtgagaaaaaagcatagaggtcttaagctcttatgatgaaatggttgtggaagttcaataatgaagagcagtcctactggaaggaagtcattaaggcaaaatatgaagaagaagataactggatgacacatccaaagaggggactacaccatatggggttagtgtatggagatccattagatctcttcggtctgagtttaaggctaacacaaatcaaagtgagaaatagagaaaactaaattttgaaaagatgcttggcctgatgcaggtaggctagaggtcttgtatcctgatatatattctctaatatctcatcaacagaagaccatattagatcattggactcctcaagggggaagttcatcttcagaggacaattaaatgattgggagattcattgggtagcagattttttcaacaccattgggcaatttaacgaatcggaaggaggtcaaaacattttgtggtggaaaggcaatcaaagggtagctttaaggtggattgtgcatacaactgcttgaaccacaccaatcagcctcagagtcactggccatggagaggaatctgaatgtctaaaattctactcgaagtggcatgttttgtctggttgttagccattgaggctgtactgactcaagacaacttaaagagaagggagataacattatgttcttgatgtttcttttgtggggaaaatgccgagactgttaaccatctctctctaaagtgcaagttcactgaccaactatggaggttattcttgaatcttaagggtatctcatggaccaagcctaccaagatcacagaagcaatccagagttgggaggaagtaggaaagcaacccaagtatagatatagatggagaattttcctagttagtatatggtgtgcaatatggaaggaaagaaactctagagcttttgatagtgtagagaatagtatgcaaaaagtcaaattaaattgtcttatgctagtatgtttttggtgtaatcaattatactcaaatgataccatctccataattgatgtatttcagtttcaaaaaaaagaaattgatgaactagactcaatttagtaaaagatagtaggatttgaagtgcatgttgtaaatactgaccaatacagttttggtattgacttttgaaaaatagacaaggttaccaatttcaaaataataaagctagcattctgattgtaagggcaccattaatcatcaataacctcatactgaaagagtcattctggtttaagttcatctactccctgaatgcactcccgagtacgtcaaagagaatagcttttatgtcttttgccaatgacatgaactggtatctttgtcatgtcaaagaaaataatgaccaaggagtctattccaaccccctttttcttgaaactggttactttgagtctcttccaacctaatatcttcattcttttcttttctagtggaaaatgggaagatgaacattgagctattcagggagtagttatcaaaggtgcgctttaagcgcgcttaagacctatagcaaggcacgaaatgtgttgagcgcttcgcctcgctttatgtgcgcttcaatatcctcatcaaggttctaagacaaacttttccttgcgaatgagcctcttatgaagaagtgacactaaacaattgatatttcactttataataaaaaaggagaagaccctaaaatgcccctcaactatttgaataggtgcaaaactaccctcaaaggtggatcaagggtattttagggccgaaaggtggatgaagggtaattttgtaccaattcaaatacttgaggggcactttaggttcttgtctgtaaaaaaaaatcaatttcattggtcatatatttgtcattctatttttagttattggttttatttgtattttttttctccttttgcgccttttttcatttaagcccacgttttatttgtgctttgcgcttaaagcccccacagaccttggagctatttgcctttaataacactaatgtgttgcatgtcaacctcctttagtatgttctttttttaaaaaaaaatcaataactctgtattatatcagggatcaaaacagtacttgggtagtactaaaacaatgtttaatagagctctagtgtctttcttctttagctgtaaagaacctagaacatctatgatagacacagtatcattagattaaatcagtaacttcatatgtttgttagttgcttgaaataatatcctgtgtattggttctcttttatgatcataggtttcttgtataccatttttccagaaactgaacttaattgtggtctaacaatttggcatatcttgtaattgtgataaattatttctttag

SEQ ID NO: 711 - DNA, 3682 bp, Solanum lycopersicum
  source 1..3682: mol_type = genomic DNA
ggtatatagttcttgtttctcaatgaattcagtacaacacttcgaaaaatggttgagtagactctgcatgttctctattttcccttgactgttactgatctatcggggtcgaatgaataacataggattgtgatatcctgaattttgtgtctcaatgtaattggtattctaaatcccatggagttccagctgtccaggagatgaaaattaagacgtagaatagattgtatatataacctttagcgcacaagtttctagtttaaatgagtatgctaatagtaacgatgcctagtttcaatcatttcatttctttatcttttgaatgaaagcaacaggcgcaagggtcgttttgtgctagtttattaatttctttttgcacttcttaaagagtttttgtttttgttcgcaaagtaatttcttttagtaatgtttgtataggtttgtaattgcctattcaaaaatttcgtttttacgtttatatttttctcatttttgttcaatagaatttgattgaattgtataaaactcattttggttgataatcgtatatttatttatgtactaaaattcatgtaagtcgacctggattagcccaaaatggattgaattggttgaatgtacaccctaattcgatgtccatcactacgtgtatattaaagacagtggcacccgcaaccttcaaatcttagatccgttttgaaattctttacttggaaaatcgagttgatgaattattaatctttatcacaatcattatccaacactgttatttttgtgttatttttttttttggaaaagggtcaaaaatgcccttagagtgtacaaaattgaacaaaaatgctctcctttaataacttggtccaaacatgcccccttaattgtttgacccacaatgcccctattgttacttttttatctgatatccctgaaggtacctccctattgttatttaattgggtcaaaatgcccttttcttgataaatattttttcttttcttttaaacacattcttttccttgtaaaaatatgaattttaaagaaccctttccttgtttcttttctttaaaaatctctttaactaataaaagtgggaagtaatttttaattcttaatatcgtttatcaattaattagctaaatctcatgtacttttaaactaaaatataggtcatatgtataagatcatagtaacccatcatcatttttcatttagataacaataaaaatcttttttcttataagataaaaaatataattttttttaatattcttctgattgaaggattatagggatttgctaatgccataaaataagaaaatttattatattatgcaaatcacaaaatatctatataatatcattgatggagttattgttgacccttttttagtttcaacttttaagcaaaaaaagatatttgcaaatgtttatcctacttcaatttgaaaaacattaagacaaatttttttccctagtttatttggaaaaataattttattatatctaaatgaaaattaatgatgggttataccatgatatattttatggattgttgtttagaaaatttttcctggagagtaaataagattgataattaatgattggtcctcctatgacttgtcatgcagaagttttattctccagtgctcggatcatagtttcttgaattaagaagtacctcttaactactttatttataatatcaacgtcttttaccttatgttatcccagttataacagatgtcctaaacctgtgggaaatataaaactaccattgctcagtaagggtagccacaactaggggtgggtgttcggtattttcaaagttcggtttaggtacccatataataattgggtaataaagtgttgaagggaaaaatattatgatagggtgcagtattgcaattatctcttaacccaaaattggagaagacaattcttgaaattgagatttctacagagcacgtgatgatttctcaaaaagagttggtcatgttcctacatacaattacattgctgactagcatgtaaaaaactttaaaactaacaaaaagagcacctgcttgaaccagcgaaacagataactgaaaccaagaaatagaattacaaattggtagtactgaataccggatgcctgcaaccgggtacgaaaactgaacaccaaaattttgaaacttctcccaaagattgtactggttaccgagtctccggataccgaaattcctgttttcgctcgataataccaaaattcccggttaggcttggtaattttcaattttcggtgatttatgcttaccggactgccgaaattcctggttaggctcgataatactgaaattcccggttaggctctatagttttgcggtttctggtgattgagtttcttagatggtctcccattgtttggtcaaggtcaaaagataaccacttattttgattattcaaatgcaggaaaggggagaacatgttcccgcagaagattcctttgaaatagcacgaaaagtgaaggaaatgcattgctacacttgttctgacattgtgaaggtattatctatttgtacgagactatacaaaaggagtaaaaagaaaaaaaagttgaaagagtagattaagctggccccacaccatgatcatcaagaaaaaagtttgaagttcgttctgataatccatccaattcctcttgttcttccatccagttctcaaactcatgccatgatttaaactcagaatccttgtttgcatctgaggctggtggttacaactgatttttgcttctaataggtccttattgtcaaatgatttcaggagttcaataagcatgataaagagccaggaaagtacatcaagcactggagaggtacaaaaccaaagacaggagcaccttattcatgtgatgttggctatgagcgatttcttggtcctgaggtctggtttatcctctagcttcaagtttctcaatctctttagctatatagttttgatctcaatgtgcttgttagttgtatgttgttagcctacaagatgggtcaaagaaaatggagtaccttgcatatagaaatttcatgtcagtccttttccttatatcactatttgggattctcctcttaatctatatttttcctcataatacctcgcaagttttccacataatgtctcataatacagacaataactctatttttagaaatttgaattattttagcctaatgtttgcactgcatctgtacctggattcgtactcccaaatcttaaattttagatcatgatggatccaacctctagatctgcacctgtgttgggtacccgcacccgaatccaagcaatttaggtttcagccatatctctcgaattgttcagacaagttagctcaaaccctatgttttttttgcacggagtagctttttttctttactctagctcagtgaaaatatccaagttaattgaagaaattaagatagtatccatgctcatttgacgaggggaagcctcttgacttggcttactggtctggtgctcgactcacgctgaatgataatctggcgaccactatggatgtggctctatggtagaaattaaaagaaaagctttggaccttaatcaacagagttagatgaagtaggatttttttatggtggcttcagatgctttattcataagttgtcttgatgaattgtgttcacag

SEQ ID NO: 712 - DNA, 152 bp, Solanum lycopersicum
  source 1..152: mol_type = genomic DNA
ggtaatttagttgctgaattccatagaactgttcatgagtgattcagttcttgatcaacaaaaaggttccctgtatcttgaattaactcaagttatgtgtggacccacttttctatgtgagtgtgatatgttgtgcacttgttgaagttcag

SEQ ID NO: 713 - DNA, 99 bp, Solanum lycopersicum
  source 1..99: mol_type = genomic DNA
agtaagtgttttcgccttccgttttcacttgaattttagcagatgaataaatggtctccaatatatcaaggatgattgactactggaattcaacctcag

SEQ ID NO: 714 - DNA, 152 bp, Solanum lycopersicum
  source 1..152: mol_type = genomic DNA
ggtatgttaatccttctagtttctattttatctgattgtagttaattactgcaaaatgaagttcgttgcatttactggtttatgcattcgatcaaataggggaatttaaaatctcattttgatgatcaatttggatattttttttacgttag

SEQ ID NO: 715 - DNA, 106 bp, Solanum lycopersicum
  source 1..106: mol_type = genomic DNA
agttggtctctttttccctctctttgattgaataacagatacgtcttaatctcgaaaataattgattctcttctatatattttgctaacttgtacttgttttgcag

SEQ ID NO: 716 - DNA, 85 bp, Solanum lycopersicum
  source 1..85: mol_type = genomic DNA
ggtaagcagcaagtattgattaggaacgcatactagttctttttggctttctgtcactaatttgcttgctttttttaccaacaag

SEQ ID NO: 717 - DNA, 95 bp, Solanum lycopersicum
  source 1..95: mol_type = genomic DNA
ggttggttagcaaaaactgcttgcgattcttgttactctatatatagctatgtgactttactgatgtacaacaactatgttatttatttctttag

SEQ ID NO: 718 - DNA, 951 bp, Solanum lycopersicum
  source 1..951: mol_type = genomic DNA
gtttgtatttttcaccatttctttatcttttcaaacttaaatttctaattgtttttgtatatttgaatttttgtgtagatctgtttgaatatctgaatttacgttcctttgatttaaaatttatttgaatttgtattttatacatagatctatgtgtttcttcaatctgtttgaatgatatataatgttgtgcattgatctcttcaaatgcgaagcgttcttgtatagatctgtttgaattatttgttttgagtcccgttgattttgaaagaacatttgatccacatatatttaggtagatcaatttgctttatgataaatctcttttcaaatgcagatgtaatgatatagatctgtgtgaatgatggtgatatcaaaatgatttgaatgcacatcgtttgagtagtaaaaaacaacatttgatagacgtcacaaacatttgaatccactctttttgatagatatattgatgcataaatctgtttgagtaacatcaatatttgattgaatctgttcaaatgtgaaagtttttacatggatctgtttggataatatgatgtgaaaatgatttgaaagtcgaattttttggatagattcatttcatgtccattagatcggatggatgtccatagtatagatgtatagaaatttatgtgtgtatatgtctacattagatggatcgtcttcaatgctatattaaaactagtgtaccatagagatgggcgcagaactgaataatacatgtatgatttattgtgaatgaatggtagttattatactttgaaatttcattagctaatgtatccaatagttaggttcttttgtgagattctatgacattactcaaattatttggatatatgaaaaacatgttatccattagaattgtatctgttgctaagaacctgttttagaggcattgctgatgatcttgttatttctcccaaaagc

SEQ ID NO: 719 - DNA, 89 bp, Solanum lycopersicum
  source 1..89: mol_type = genomic DNA
gttaatatttgtaccttattgcagaactctatttggatttgttcagtttgatcaagttcttatatttgtctttttgtattgtttacagt

SEQ ID NO: 720 - DNA, 91 bp, Solanum lycopersicum
  source 1..91: mol_type = genomic DNA
gtattgtttggtacattacatcatatacaatacgtttgactgcggaagtttctgttgtttgaggtattaatgtttgtgctacctatgcagg

SEQ ID NO: 721 - DNA, 27 bp, Solanum lycopersicum
  source 1..27: mol_type = genomic DNA
gtattttaatggtgtcttgtttgctga

SEQ ID NO: 722 - DNA, 943 bp, Solanum lycopersicum
  source 1..943: mol_type = genomic DNA
ggttttgttcatttcctctatgaatgtgcctgttgcctttagtttctgttttcgtttttattgcggattgcttgcttattcttccgattggtagttcacactgcatatattagatctctttcttattgtcattccaaaatcctatgctaatttgcccgatgtatgagttcatagttgacagtgcctttagtttctgttttcgattttattgctaattgcgtactgattcttcctattggtagttaacaagtgccaatactagatctcttcctcattttcatttcaaatcctatgctaattggtccgatgtatgtgcttatagtcgatataacctagatgtaaccgaatttgatcttgttttattttgtttaatgcttgtttgttgtttctatgaatgtacctatggtagcacagttggtcatatacaggtctcttttactcattcgtaatcgtatgctctatgatgaaaatgcctatatttgctgttaacaacttgtctgactcagggtagaaataatgctgatgcatatgtgcacatttgaatgttcatataaagcctgaatctcatagagcacacacatgagtggcataaaattgtatagtctagcagaaggataaatttaactttctcatcatgcatctcacaagaattcatactctcttagagtgcatgatcgagtactgagatttatgatgtgtctggatcttacttatggtaatactagtcaatcgtcgtgtgtttcttttccttatactcttggaaatttatctaagatcttatttatattgtttctgtcttgaaatttctggacagtgatattatctaattgaatacttttatgtctaatgcatctatttgtgaccctctttatacacaattattaccatttgttgattgaggggtggtagttgattgttttgtattctttgttttatggatcag

SEQ ID NO: 723 - DNA, 88 bp, Solanum lycopersicum
  source 1..88: mol_type = genomic DNA
tgtaagtgtttctctttagtggtaaccaataatatgatctgcaagtttaagtaagcaaatgattaattttgcctattttctcgtgtag

SEQ ID NO: 724 - DNA, 84 bp, Solanum lycopersicum
  source 1..84: mol_type = genomic DNA
ggtattctctgaatcattggttcttttatctgctcaccaactgtttgatgaaattcctcaaagatctttattttatgttttcag

SEQ ID NO: 725 - DNA, 2380 bp, Solanum lycopersicum
  source 1..2380: mol_type = genomic DNA
ggttagtagcttatgtgtttgaaagttcagctagtatatatttccacataatactttggttgcagggtaccttaaccaacagaaataaccttaaaagctaatagctttttcaagtaatatggatcttttagtaaggggttataagaaggagctgtttgtgttaaagatgataaaattggatctttatttgtacattaggagcgctaatgtacaaattattcatgactgaccttgcttcatttggaaaacagtaatatatgcagctgtgtctgctttattaccataagttcattatgtttctgaaatttagacttatttttgcttagctaaagagtagcttgataacatagtaagtgcaccagcacaggaaagtctctctttctttcttaggggagattggttttatggccaatgacaaatgttcttttacttatattgccatattggtaaataaaacccaagattgtaggtagggttattttcttctattcaaaatctaattggtcataaacttgtgggaaattgtttcctcctttattagtcataacaattgttgtcttgtaggtgacaatttgctttgaccagttaaataaaaataagaacacgagttgatataatatgaattatagtatggcagcccttatttgcactttatccgggaaatgatacaatcagtagtcattggtagggtgatctatgcttacatacaacattattgattgattatgatacagaatgttttagattctgactcaagtcgtcttttaccgaatgtatctacctctgttgtgggatgaaagtttagcagtcatgatagatggttatctcttactttcactatgaatgtatggattttgttactgtcatttagtgcaagtacaattagagtgggtaagatagagctcatcaacatgccaaggtcctactcatctgtgagggttgtgccagtgctcttaaatgcagatgaaacttacttatatttatgataataatcttacagtacaccatgttcattttattttgcttttttatggcattctacccatttaacttattttcatggaatttagatcatttgcctttgggtaactaagtgttatgcctgctataaatgttctttaggaagatttggcaagaactgtaaaaccaagttgtacatgctatttatatggacaccataaactgtatgaaaacaattacaaaccaaagaatcaagacatgaggaagggataacaaaagaactcaagcaaagtaaacttaaaaagaagatggagagggtagattaatggattggccaaatggagagggggagaagcaagatagaagaggaaaattcaggatatatttctggtaagatgacaaatgctagaaaataaaccctggtcaatcaagttcagggaaaaggtaaaggtagtgaaagagttcaactatcttttattagggatgtcggtttggttaatccagtttgatcaagaaatttgtaccatatcattttcggttactctatagtgtattactaaagttagacttttccaaaatgtgccaatcatctcaatttctctttgatatcgatacgattcggtttattttcagtattttatttttaaaacatcaagtaaaaattaacttatcaaaaacaaagtgtcaagaaagagtcagtgttattaatccatccagaagatgcaaagttacaaaaggggatctgtcagctcagtaagaacaaaatagcttgtagcgataaagagctgaaaaatccaggtagtgatctaagttatttacagggtagaagttggcccaactaaaaaggttaaccaaacaactagccttaagcttacaatttggggttaaaactccattgaaattctcctgtttctttcattccaaataacccaaaaaatacaagctggggtcatgatccagattttcctgatggattttctaacttccatagagctccaactagtgtaggcatctctgatattgaagggcatggaccgacttataccaaaaagcgctaagaacatgttccaaaagtgtgttgcaaaagtgtgttgcaatagccatcacccaattcttaaggccaccgtcaatatagcattataatttataacttgctaggaacctgaaatgaatactataaaggctctagcaagttcatatcacatcttcagttagaccctagatgttcctttttccctttttcttgagctatgaagagaaactgctacttttggtcacattctgttgttggtacatccagtatccattacttgcttgtttaattatgtatttatgttttgtctacttcttgactggccttctattagatctgcataaaatttcttgatatattaagcagatatttcttgtccttttttag

SEQ ID NO: 726 - DNA, 986 bp, Solanum lycopersicum
  source 1..986: mol_type = genomic DNA
ggtatgtacgacatctctcaaattggttgaaagaaaaaatgtgttgttttctcttcattcaactcctcatctaatttgttcactatctagtagacaaacgaacttattataaatagaatcaagcggtacaaatgaaagaattctgatatcctgacttccttgttatgataaaataaattggagttcaaagaggatccaagattatttaattcaaaaaaaaaagtgatatggaaactatatagtaattgcaacctctagaaatgactacactcataaactttagaaggaggaatatattttatattgtgcaagtgcaatacctaggttcaatattttgttcaaaaagaagatgtgttattatgtgaggacaggatagctgttctttgtttatttcctctttgcatacatattcttggtactggatcagagcattctttgcctgaaaaatataactgaggccttacagcatttttcttttttgcaagtggaaaatttaagtttgggagagcaccttgttagttgctgtagcaagcatcatctttgaaaaatataactgaggccttacagcatttttcttttttgcaagtggaaaatttaagtttgagagagcgccttgttagttgctgtagcaagcatcatcttggaaagtttgtttagaaaaacatcaatcgtcagcagttcccaattgaatctctatcgctatgcctaaaacatattttcgctaattgcagtaccactacattggttgatttacgccatgtatctgtttttatttctttagagttttgattcaattgggtttgtctagtgtttccacatgtgcttcacttgtgggaaatcattctaaagcttgcacaaattgactttttgggtaccagcacacagacgtgttttgaggtctcagtttgaactttgaaattctaaaaaggtgtgtgttaacaagtcatctcttaaatgttcaatctattctatttgattcaatgtag

SEQ ID NO: 727 - DNA, 288 bp, Solanum lycopersicum
  source 1..288: mol_type = genomic DNA
ggtatgatttggttgtaacattgtataatatacagctagtgggaagggggaaaagaaccttgaataagaggaaaaataaaagtttgaagttccttgtgatattgcctactctgcatgttgttcttccatcctgctcttgagttggagaatctgttctacgttcctgagaatgagagcaactaattatgtcaagatttaagctgcttatcatcctcttcttacatctgaggatgaaattagtaactgaggatcacttgtgatttattttgttgctacaaatgatttcag

SEQ ID NO: 728 - DNA, 348 bp, Solanum lycopersicum
  source 1..348: mol_type = genomic DNA
ggtgtgctctgcatttcaagtctctgataatttcaagctccaaggtcttcttgcagcttgttttaagctgaaaattatgtagctgttgtagacattgcgccaattgtttacagatgtatgcctcatatactgctgatttgctatatggcagagtgaactccaaaagttcttataatcaacataaaaaggcaacctggtgctagctcccgttatggacagggtccagggaagggctggaccacatagtcaacatagttatagctaaataagaaaacaaagattgcagaggtgatgcattatcgctaggttgggtgaacacctttctgatttaagaactggtttttgcag

SEQ ID NO: 729 - DNA, 179 bp, Solanum lycopersicum
  source 1..179: mol_type = genomic DNA
ggtaaagttattctgttgataaactatataagatttccgttaatcaagtgtccagcaatttgtgaccaatagaaaagtctcccttatatggttgagttaaaagtcatgatcttgatatcacactctttgaaataattcttctaatgtgtatctgaaattatgcccttgtaaaatactag

SEQ ID NO: 730 - DNA, 103 bp, Solanum lycopersicum
  source 1..103: mol_type = genomic DNA
agtaagcatctatgctttaatttttgtcttaattaattaacgaatgtatctttggtttctggtacttaaaagatgcttgcctgctgaaaacatattcactcag

SEQ ID NO: 731 - DNA, 115 bp, Solanum lycopersicum
  source 1..115: mol_type = genomic DNA
tgtaagttaattattcgatttctgttactattggttttataaccgcaacttaagttactctttgtaaatggctggtcagcgaagtctgacctatgtagttgtttccttatatcag

SEQ ID NO: 732 - DNA, 403 bp, Solanum lycopersicum
  source 1..403: mol_type = genomic DNA
ggtaatgctcattaatttcgatacttgttgtgtcattgttatcctcctgtggatatcaaagttcttgccattccgaattaagtgctgcaccttatggggtctgtttgctcttattttagtgtaataactagtttaaaaggatgggggcatgaacgcaggatgggtcgtgtagtgtactcgactaccattaagtagttcaaagggatctctagtcaattacatgttttggcccctctggaacaaatgtagaattaggatccttcaatgccgtgatgtttgaaccgctttctaaacttaaaacttagattaagcgagcagaaaatccacattaaagtaagatgatctttgagtgtcaaacatgctgggatcttccttattcataactactatgtcaatctcccag

SEQ ID NO: 733 - DNA, 73 bp, Solanum lycopersicum
  source 1..73: mol_type = genomic DNA
tgtactttttccaagcccttataaatagctcgtcatcctctttccatttattctaatttatttgtatgaacag

SEQ ID NO: 734 - DNA, 187 bp, Solanum lycopersicum
  source 1..187: mol_type = genomic DNA
ggtccgtatcacagtgtatctttgacttgtatttcagttttgtgttcagttgaagaatctgcttcaataattcagcatttttttccctttcatgtgtattagagtgtctggaagtgtagctctatgaatttgtttattcacaagtatgaatttggttgtcagcatctcagttatttgtggcttacag

SEQ ID NO: 735 - DNA, 104 bp, Solanum lycopersicum
  source 1..104: mol_type = genomic DNA
ggtagtgcagaatcatcggtgcatctcaaaagcttatctactaatattggtttatgtttatcttccttcttctaatgtcaatgtattgaatttggacgaggaag

SEQ ID NO: 736 - DNA, 86 bp, Solanum lycopersicum
  source 1..86: mol_type = genomic DNA
tgtaagaatgcagcctttattgcccattgctttaaaaaggctggatgttctatttgcttatgtcttgaaatttcatctaaatgcag

SEQ ID NO: 737 - DNA, 77 bp, Solanum lycopersicum
  source 1..77: mol_type = genomic DNA
agtaatatactgtccttctggagaaactgttcaaagagtttctactactctaacatgtcttttgttactgtttgcag

SEQ ID NO: 738 - DNA, 87 bp, Solanum lycopersicum
  source 1..87: mol_type = genomic DNA
gtatttactcctaaatctcccaattactctctctgttttgtatctgtatttcctgtgctttagctccgcttcttggtaattcacagg

SEQ ID NO: 739 - DNA, 2105 bp, Solanum lycopersicum
  source 1..2105: mol_type = genomic DNA
gtatgtttatgtgtattaattggagccacatttttcatgattttactagactaggaacatttagattataaaggaaaatgcaaaaataagtgtgttatctacttattttgttgtcatctctatttattggacgggttgggtaggggtctgagctagtggagtgaggttgaaaatgaagtgtgttggaggattgggaggacaaaatcgctgcggaatgctatttgtaaaacttaattttttctactttcgctaggaaagtcatttcttccgttttaaggaatctgttttcttagagaaactattttctaaattttttgaagtaaggttaattggtactacccaaaacaccctaagttagctaattgagaaggggtgtgtgattcccagtgggtttaccagttgtggcaataaaacaagtgatgttagtattttcaactgtttgacttgcctctagatttctatcttgttaaatgttaatcctgctgcttttactttctttttgataagtgaaaggaacattcgggaggtttaacttaacacctcttatagaatcttcacaatttttttccatgtaaaaaagaatcatttcttgtttctgagtgtacctgacgatatttattcatggatcaaaaattcaaacagtcttcttgatcaggacaaatgtgggtcaaccctgaaagattccacagaaggccatggaaattgaagtaattattaaagtacatggaaccaataacaattacaacataatgggaagttagtttagttaccattcacttctcaaatttcacataaaaaaataacattacattcacttagtaagtttgtattgatcaaaacaacatgtaacatatgaaatgtgaaaaaccaccagtgaacgaaaatatgagcacttgggctttctttagaataaaaatgaattggttgggtcagctattgggtctattttggctggttggattcaaaactggttcagattgctaattagtgttttaactatttttttctcaaaattaaatttgccaagtgctccagctcacatgtgcatccttgataccacctggcataacccagaggagtccaaaagaagataaacgtgttccaactatctgctgttattgtgcaatgtccttatacaaaaaatagaggtatttaagtcgatatattcatcagacacatgtagcatctattaactgtgcaaatggatcttctaatcaggttgtcttgagttagagttgcttcattgagtgcattcaattcaaacaggatgtctaaagtactctcgattctgcataactggaacattaggttgagtcattaggcttgttatattatcctctgtgatggatttctcttccgcacatgaaggataggattgatactaaaggcttgtttagctaatcatcaaacgtttactgatcgtgtaactaattgatcctttggtagttgatgtaaaaatgataactcttttggaggcaatgtcaggaccagtttggatggtgagtttactgtaagtttcgaatatgactagtgcttaattatccaattatgattaataaagttcaataatgaagtacacaagggtatgacattaaggtcaatgaagtttaaatgcaccaaaggcgactatggttcaaatccttttagaaaaaaaacagttaggtgatttcttcccatttgtataagtcttggtggatagagttactccatacctgtgccaatggcacttggtagatttatcgaggtgcgagcgacctgatctgaactcaatcttatttaaaaaaagttctaagatgatcagattatagtgaagtgtttggtgaagaaatgatctaaattacttcgtgctaaacaactcctatgtagataatattaaatagttgaggtgcgtgagagctgtcctggacagaactgttttcagggaaaaaaagttcccagtgaacagtctgtagtgatgtttggtcaagaaatgatcaaaattattcttgctaaacatcacctaccatgaacatgtttttaaatactgaatgcagataatacatcatcatttcataggtgaatattagcctcagggttttattatgcttaccttatcatattgcagg

SEQ ID NO: 740 - DNA, 612 bp, Solanum lycopersicum
  source 1..612: mol_type = genomic DNA
gtaagggttttctattttgtggggatagtatttgggtaaatggtttttctatgtctgtaagcttgaccatgatatttgtgatgtcaataaattttatgcccgaaccccctcccctgaaataaagatagaaagatctaaccatctaccagagtatgaaactatcaggatagctgacaatttatctagacattaggtttaactactgtgttctatgacccgttcctatttatcaggagagaacattctctttggattttaactgtaacctctttggatgttaggccaagctggctaggcaaattcatgatttaattttagattgtcaagacagtgcaatctgactagaatattaatgcacgacctattgtaacacaacacttgtcaacaatgatacattccctactttttgctggcactgatgccatacatggtgttcttggtgtagatagttggatgcataaattttgtttatgtgctgctatgttgctaacctgagtctgacatatgaaacaaatgatggttagggattactttgtcttgtgtgcattattcatgtttccgttatgttttctgaaaaggtactcatgtcacattatgttttccgtatgtaga

SEQ ID NO: 741 - DNA, 736 bp, Solanum lycopersicum
  source 1..736: mol_type = genomic DNA
gtatatgctagctttcatccaactttttcgcaggataagatagacccgatgtaactatattcagcttggtttgtttagaatcttttggttcttactttttcgacagaagctctgaaatcattgttgtggcctttcctttgactattgcttctctttgatataaactgtctttgttggtctttgaggtttgataattgttgtcaattgtcaaattattttgtcttcttttttatcttttatcttacctcataatttttatccaactgtagtttctaggaagcataaacaggatgcaaattgatatgcttacacagaaaagaaattgaaggaacgtggactaatcaagcatcatataaggtccatatagttttacatatatgtcgaataaaaaagacacctcataaactcattaaaattggcagaaaaaattttatggtaaaagttgtctgaccttaacgaaatatttatactttacaaaagtaagttgtatggtatgtactatttttggaaaggggaatctccgacattatcctcttttctcatctctctctcttttcccccttgtaagatattccgtgtcaattgatgtgcctccatatcaagtcatggccttaaacaattggatgatgaaatattgtcgcgattgcattgcaaatatataaatgaagagatgcacttaaagtttgcatacctttgtttctcataaggcgtacacattataccatttatgtacaga

SEQ ID NO: 742 - DNA, 499 bp, Solanum lycopersicum
  source 1..499: mol_type = genomic DNA
gtaatggtgcatagcatgtatatttggggttcagtgggtgatgtgacagacagtcagagatttgctactgatatataaggagagtatgagacttgactgctctgtcacttatttagacaatatcgagagaggaataaaattgtgcaagggtgttgaagattctttttgaagacataaatgaaacatttttctttttacattgtgaagatttggagcacatatgatggtccagtcagctgcctagatgctctttctgcagaagcctatccttgtgtagaattctccaagtatacatcctcagttccctattatatcataagaattaagaaccattatctttattgagaacaaaataatttggactggcaaagctaagatatttaaaatatggtgaaaggcaaaccctgattctgtgccttgaatctttgctgcatatatcctgttgttaaacttcagcttgcagtcccttaaaccaatacttattcaaattggtggcagg

SEQ ID NO: 743 - DNA, 228 bp, Solanum lycopersicum
  source 1..228: mol_type = genomic DNA
gtatggtgttcatgtaatcatgtcgtcttttttatcatcctaaaccaaaaggttgctttgttttattatgaccttgttaaaagttcttttattgatgacaatagttacttggttcacttgaccaaacaacagtttgttgttgataattgagagcatgactttctgtggcatttatgatttatgtgaacttgttggtcacgataggcatttttttttctgtcttgaagc

SEQ ID NO: 744 - DNA, 4702 bp, Solanum lycopersicum
  source 1..4702: mol_type = genomic DNA
gtatgctttcgagtcctatcatgcagctgtaatgaattgacatagtagtagcattgtgcttttatctatttgaaagggttaaaaaattatgggtggcgttgacatggtgtgaccatctcatgtaaaaatttaaaatggtagagagcaccttttaatcttccacatgcccctcacctgcaggcttgattccattttaatgtgtcaaaaacatgatattttattttgataatgaatggcggtgagactagagcccagaaccatgtttggttttatataatgttattcaatagaccttgagtatagacaatcctagtcccacactatgccagtattgtcaaaagtgaaaagcgctaaagccctgatgcagcttaacgcccaaagcgcactaaaagtgtgggcttcacttagaaaaagcgcaaatatatacatacatacatacacacacacacacacacacatatatatatatatacacacacacacacactctagataatgaatggcccgtttacgggcccaatattacaattttataatctaaatttgattaaattttaaaagaaaaattattatgatattttgaaataaacatggtaggaaataacaataaaacataatatttattaaaaataatgaccgatgaaaattataatgaatcatctcattctttatgaagtaatagaagaatgaaaaaaaaagttatgactttggtcttaatatttattaaaattaggagaacaattttgtataataaataaagaattttttccaaagtagttaataaacatgatggattaatgttttatatcaaagaaagaggatttaaaaatatagcaccagttgatataatatatactgcagtaatttaacatgaggtagttaatataataatttatataacttgcttaaaatgatttgaactatgataaaataatagtaataaataaatgtatgtttttcaataaattaatcatgtgttacgtgaagttttgagattatacataaaaagagaaatcaagttaattagatacttcaaaaattatctctacaatccaaaaaaaaaagcaacgccatgaaattgaaaagtccgaagagaaccagaggaaatgacataacatgcttctcaaattgttgaaaatttttgttcttgaagagttatctcacttcactggttccttttgaattaagcattttgagaaaagtaattgtgattgaaattgaatttaacatgttaactgatagggtgtctgaaaagtgtggattagttgaattttgttgaaagttgagtcattatagagagaattgatcgaaatgtagtttttaatgttgaaaaagaaactgcattattggttttcctaataagagatctataccgaagtgtaatacttaggacgcaacaaaaaataaaggacgaaaaaatttattggtataagacatgagaggggagaaaattaaagaatgaatgaaatgaagaatgaattaatgtctatttatttgtgtcatagactggttctagaaaaatcttataatttgtagttttttgaaaagtcatgtaacttgtggaggaaatttaccacttgaaaattttgttttaagtgaagtttaaaaatacaatttatagtttttaaaatgaaatatatatgaaatgatcatattactgtagattgtcctcaacttttaaaatcaaacacatctttagattaatatgtttgaaatcaagtaaaagtacagatttgatgatatattttaatgaagaactacacttttataatctagtagtttactttaaatacaaatatatcttcctacacattttatttgtaaagttactttttaacatcttttaaaatatatatttttaaaaatattgaaattaatttgaattattctttaatttcaatctaatatatattattaattttatcgtacttgtttcttttcaggttcattaattagagtaaaaataaaggttaaaataattaactatatttttaagtaatgaaattttatgttaaagtagacctttttagtaagcataatgaatataaaattattaggaattaattagaataataattaaatagagtaatgaatagatatcacaataactcataaaaaatgtgaagtgataacaaaatgtgttgataaaaataacattaatcaaagatgtttatcaaactatttagtttcctgttattattcttggtaaatttttgtaagtatgaaataacatttttacccttgatcaccattcactttcatatacaaagagatgtttctagaattatttgtctctcttgctatctttattaatagatttttattagtataaaattacatttttaccctggtcgtcctaccacttcactcttctatataataataaaataaaattatatatatatatatacatacatacatatatatatatacatatatatatatatatatatatatatatagagagagagagagagagagagaacatcatagacacaaaaatagtaaatatgtagtgcttataatgaagtttgttcatcaaaacatgtgtttcttatatgttctacttctaataaaataatattcttccatatcatcttcctcaatagggtgattctcattggtatcagtatcattagatttatagccttcaatctcttcttcccctgactcatcttaatcaactcatcttctgtcagcacgtggagctcgggagcttgagccattatttgtaataacttccgaccgtctcttttgtcgccttgtgtatgtcaacacatcctcactgttcgacgctcttgaaacatcaccccaagttaagtttgtcatcaccaaacaccaattcatcttctgcttccatatttttacccatcttcccagccaaccattcattactatgatcaatgttatccaacgaaatggatcaatgacactccgcaagtcataacgagctttaaagcacgattatacgtagcatatactagatcattcaatcttagatgctctagtctgtttctttttttggtatggatctgtgttgcattggttagtgttagtaaattagtctaattggttaactatgcaaagaaaaattaataaatatgatgtataccactacgattacttagtacttacatgctcaaacacactccagttacgctaacatccagcagaactagccgtaaacccaaaattctaatggctaattattggagattgggagctgaattaccatataaattccaccattcaactgtaaaagagttatgtagacatcattaagtataagttattacccaagtactaagtaagaagtattaagtaaacttataaatataaactaaataattatgaaatctaaatgttattgtattcacttaccaggagatcttttcgttctagatctttttgcaatagaaaggccaaattgttgttcagctcttgtgtgcaatggtatctctgatatgatcttgtcttgtacttcagtgctaggaaccgatttttcaatacaagcatacaacccatctgttacttcttgacaattctcaatagctggattttgaaagaactatttattcttagtgaaatcgctcattatatttgagattcctgagtatccataaatgaaaccgacaagggcaattgctttttggaaggtcttcttgatgataggaatcttccctacgtcttctaacataagatctatacaatgagctgcacatggcatccaaaatatgtgtgctctttttctctgtaacagttgacctatagaaaaaaaagggtaaatagatatgttaaaatttagaaatcaagactttgatcgatattagaaagtaaaacataaaacttagttttttaaagcaagatattcttaccagctaacacaaagttgctcattatcacttacaatttgaaccacattctgatctccaacgcgttccacgtatctatcttgcaattcacataaactattgggttggtttctaggcatggttatagatatgagagtacaaaacaaagatagagaaggaacaatgataaaagtatattgtatagtagttgtagttatgtcaaagaaatggttgtctactaagctgtttggaatatttttttttcatttaattcaaagaactttaagatattttcccaaagaattaaaatttaatcagcaattctcttaacaaagttaaaagagaaaggactagcgcatttgggtttggaatttttcacaatgcagttcagatagtgcaataggccttttgggcaattatcaaatcaaaagttttgatagatagtgaaagaaaaaatagttgtctgttgttatgacttgaatgggaaattcggttggtcggactgcttagatacgttcgtgggtctttatctttattttcacttgtataaattgataagttaaaaaatgagacggagttctgttagtttttaagagtgaaaatgacccacttcactaacagcaagggcaaatttgggacaatttgcaaagaagggaaagttgccccatttttcatagttgaagggcaatttggcccttttagcatttttcagcaggtgtatgtgaaagagataaatttaagaccctatgcactttcaggctaaatttctgcttggcatatcatgatgcagtttttgctagtggtaggctctcatttctcaaatatatgacatgatttgttttattttcagt

SEQ ID NO: 745 - DNA, 87 bp, Solanum lycopersicum
  source 1..87: mol_type = genomic DNA
gtaggtgttataattcttcgaaagtcatgatgttgctatgaacttttggctgtttctcaggcttcatttcttaaatgcttaaacaga

SEQ ID NO: 746 - DNA, 78 bp, Solanum lycopersicum
  source 1..78: mol_type = genomic DNA
gtcattagaacttcgtctcttccccagcctctctagtctgcttaacggaggtaaaatattttattttattgtgtcaga

SEQ ID NO: 747 - DNA, 418 bp, Solanum lycopersicum
  source 1..418: mol_type = genomic DNA
gtatgctcgtatatcgccatattgttagtcactgttgttgggcagttgtatattgaaaattctttgtgatggtgaagaactcgatatccaaggctttttcctttcactttctgaatattgtggtgttacattaatgcacttcgtatgagaaataaactcatgtcatcgtaatgttttaaaagctcatcttttgtgagatactatactgtaattcccgtatgctgtcacttaacttatctggtactttatgtagtagatttaaaacaaaaaagagcttttgcaactaaatttattgttgcaattgtctcttccattttactcttggccagcattgtgcacaatcatcttccatttattttcattttttgagattaaaacttttcaactgaaaatggaaatacttaaacttgttaatagc

SEQ ID NO: 748 - DNA, 350 bp, Solanum lycopersicum
  source 1..350: mol_type = genomic DNA
gtatgttatatttcttgtcagataatacttgagctagcttattgtagcattattcaacttgtttacaatgagttgttgtagtatctacttcttctcaaaatggatatatgtatttataaagttgaggcgaaaaataatatatattaggtacagtgttgctcatagtcgtatatttcatgtttcagtacaccaacaacaacaacatacctactgaaatttcactaagtggggtctgggagggtagagtgtaagcagaccttaccactacctcgtgtaggtagagaggctgtttccgatacttcatgtttcaatatctttttatttcataaattcatcttatgttgtgtagg

SEQ ID NO: 749 - DNA, 89 bp, Solanum lycopersicum
  source 1..89: mol_type = genomic DNA
gtcagtatgttttcttgacactttgtttggcgttagtctctgtgttggattgttctttaaaggtgtatcctgatgtaacctatgacagg

SEQ ID NO: 750 - DNA, 517 bp, Solanum lycopersicum
  source 1..517: mol_type = genomic DNA
gttctgtcggtactgggatagctggatgggggttagctctttcaagagactgagttagcattattagttgcaatcaaactctttatcttttcaattttggagaagaaaggtctttgttgcaacttgttttgcaatgaatttgggaatatttttaaaatgtttgtcaacacaatcaaatagaacaaatatatcactcaactttgtgatttagagcttactctttattacaaaagtaaatcaattagtttgaataagatcaatatttaatcttatcttcaagattagaatgaggtgttagattactttcttaaaattagtcgagttagttatgttcacttgtgcttgagcatatgctaattacttttatgatgaaccaattactataagaatttcgagaacggttcaaaaaagctttaacatattagaaatatttcaaaatgtcctttccgcatattaaataaaaagtgtcctccacctaggatgtggtttaaatttgtccctccttctatctattaga

SEQ ID NO: 751 - DNA, 82 bp, Solanum lycopersicum
  source 1..82: mol_type = genomic DNA
gtaataatctcttttcctatgaatttttgtcttgtaattggtttcattttttaatcttgagcatttcaatttcggtgatagg

SEQ ID NO: 752 - DNA, 861 bp, Solanum lycopersicum
  source 1..861: mol_type = genomic DNA
gtacgatatacttgaaacacatttttaaattttggaaacatttattaaaattcaattctattaagttgtgaaattaggtctttaagcctaactccgtgggacttttgtcattctttaactgttctgataccatttgaaaccccaaaagctagctcgaatggacttttgtcattctcgaagggacttttgtcataagcctaacacacactccaaaagctagctcgaagagaagatgattgtccaaacctcataaggacaccactcatctcattaatcaccaatgtgagacttttgtcattgtgctcctttttttcagttatagggcggagagagggaggcaactgaaacttttagagtcgagtttacgctctttcctcctctttcgataagcttttcatagccatagtcgtactcaagtacccttgcaggggaatccacttctgagatggagagaatcccgggatgcatatgctcttttcagggttgaaggaattaatctgaaaggatagactagcaaactttcggaattgagagaagcactttacgcatatttagtgcagggtatctctggaacaacacctatttgatttttggccatcttaacaaaaatgtgtagctaaaatttctacatgacaaatgtatgataaacttggctggattaataggatttgatggacaatttctacctgtttgtgaaaacactagataacgaatttaatagcgattcaccaaaataatttatggagatctttttaaccacaaatctgatttgtaaattgagtgatctcatatgatggtgcaaatgctgccatattttgtatttctgtgagacatttgccaattctatgtgatttttatagg

SEQ ID NO: 753 - DNA, 82 bp, Solanum lycopersicum
  source 1..82: mol_type = genomic DNA
gtgaagcaaaatctctactattttcatttattccactcttgtgttagtaggacctaacacaacattcaatctcaaatgtagg

SEQ ID NO: 754 - DNA, 98 bp, Solanum lycopersicum
  source 1..98: mol_type = genomic DNA
gttagtaaaaactcagttatggtttgcttgcttctgttatagatttgatttaccatttgtttgttatagacaagtctgactgtgtattgaaatgcaga

SEQ ID NO: 755 - DNA, 495 bp, Solanum lycopersicum
  source 1..495: mol_type = genomic DNA
gttagaatttttctctattttttggtttttgtttgtttagattctgagtttagttaatcaggtgctgttaaagccctaaattttgagtttttttcggttgttttgatggaaaatacctaacaattgagttttttcatgttgttttgtcggagaatgcctacaattggagttcctttcgttgttttgatgagaaagcccctaatttgagtgtttttccgtcgatttgattttaaaggtttatattcgagtttttttcgtcggtttaatgagaaggcctaaaataggagtttttctggttgatttgactaaaaaagccatggaattttgtgtttttgatgtcgctttggttctcaaggcctaagatctgagtttctccggttgttttgatgaaaaagccctaaaattggagtttttatcttgtgttttaggttgttttaatccttataatttgagttttttcgttgttctgattgttgtttttatgaattttgcaga

SEQ ID NO: 756 - DNA, 173 bp, Solanum lycopersicum
  source 1..173: mol_type = genomic DNA
ggtaaattcctttttacagttctgctttttgaatgtcaaattaggtgaactttccaattggtttaatgtaatttagctgaactaatttgggacggagggagtagtagatgaaagagtgaagtatagatgaggatatcatgagtagctggtttgataaggtgtatgatttgtag

SEQ ID NO: 757 - DNA, 172 bp, Solanum lycopersicum
  source 1..172: mol_type = genomic DNA
ggtgcgtgcctttctatgtgttacactcgatcttttagttggcatactgctctagttgttttttttaactgattcgaggataaattctaatgaaacagagtattatgtgaacagtacaaagagaaatgatttctttgagcttatttatctttctgatttttctcactaaaag

SEQ ID NO: 758 - DNA, 163 bp, Solanum lycopersicum
  source 1..163: mol_type = genomic DNA
ggtgagctttcttatgagttaacagttgtagttgttaatttgtgaaaatcacttgcatttttgactatttgaggctttttttgttgttttaactacttgtattgttccatgtgctcggcaaattctcaccctaatccttcctgaaaaattgtaccattgacag

SEQ ID NO: 759 - DNA, 561 bp, Solanum lycopersicum
  source 1..561: mol_type = genomic DNA
ggtttgtgttccgttcatttttggtgtcattttacattggtcccatatgacaacatccacctaaaccaacatccattgttgagcaatctaaacaggtttttggttctcaaacataatttgattttcataaaatgctttttaacaccatataacaggcctctacgatattttttacattattaattgattgtaatacggacatttggttggcaaagaagaatctgcatcaaagttttatctatgaaaggactctctgtatcattatgttgtcaatgtggcacatatcctgattgtttatcatataattcactaataagatttcctctattcatataataaatcaccagttttacccacttaagagagcaaaaggtataaagggctggaatcacaatgacttccagaatttgactaaaacacctcgcatcttttttagagtactaccgtatagctccctacaaaccagaactagaagataagatatgagcttgttccttagacccaaggttgctggaatccttttataaatttctctcttctgctgttatggattctttgcag

SEQ ID NO: 760 - DNA, 328 bp, Solanum lycopersicum
  source 1..328: mol_type = genomic DNA
ggtcagtttctatttgggcgttgctgaaaatccagtcaaatttctgtaaatataacgtatcaacgactcaatttgttgtttagagggcaaatattatttcacaatatatgcatgtgtccatttttacttgatgaatcagctcatgcaactctatttttgaacattcttccatttgacttttgagcaagagggtaaggtgctaaaaggtttgaatagttatctcactcaattaaatcttcaactactaagaagtgagcatagtaagatcttttcagtgcaccaaaccaaggccttcctttttctttctaacttctctttacctatacag

SEQ ID NO: 761 - DNA, 837 bp, Solanum lycopersicum
  source 1..837: mol_type = genomic DNA
ggtagtacttattcatttccttcaacttatgttggattcccggaggtgattaaagttgttagttttgataatcttggttgttcttttaaaagttctaagctcgtagcaaaactttgttagataacaatcttggttgtactcttagaagttctaagctcatagaagaactttgttagattgaggaagaaaaaacatttatgtcattgttgagcgacatttatgaacatgttacatataaagcagaatctgtcctttcataagctagtgtacatctacagataagcttttctttcacagttatcgtgtgcctttccttagtcaggcattcacttgcttgttgttgtggcatgtcctggtccttaggtttattggattttatcttcttgccttagcattgggccacttagggctgctaccaccaatttaatacatacccatgtaccctcatcctaatatatttgacttcttttgttaattacagtagttttccatccctgaaaatgttaattaacataaaataacagtacatatttctcttatttaatggtcatggactgttttcagtcaaatagccccacttctcactttccactaataatatcttaaacatatttgactaactaatgaagtacttgatgctttatactgttaatggcaaaaactaaacattaataacatggggagagaaaatgatcaaaatgtcactaacttggcaaacttttcctgttctctttctaagattgtattatacattaccacgattcttccaaagttttagacataatctgattttggatttataatagtattatgatgtctttctttcaaaaactatag

SEQ ID NO: 762 - DNA, 458 bp, Solanum lycopersicum
  source 1..458: mol_type = genomic DNA
agtaagttttttattcatgtactggacttatggttcttgtttgactttattgtatacttgtttttgtagaactcattcatttttaattctttgaactgtgaaagttttttttttgttttttgagttgctagtaggatatttagaaactgagtttgtattctccagctttctgagttaatcagcggtgaccagacaacccctgagatgaatcacagatgggttccaatgtttcttgttaaactaatttcatcttacatttgctttactccttttaaattaccttatcaaaaagaaagtttgtgctctctaattgtttattctttctgatgatttaatttactcttaaatttcttcatgaacaacgtacatggattgcatgtttttatttctcttcgtgtctgcaatttgattgcattgtttcaataatttatgtgtagccactttttggtcttttacag

SEQ ID NO: 763 - DNA, 699 bp, Solanum lycopersicum
  source 1..699: mol_type = genomic DNA
ggtatcaactttctgtcatagaacatttagggtgggaaggaagcgggtttcacttagacatgattctttgcactatttctaccttgcaagtgaaaagttactgaatcacttcaaaaatatgccgtggtaacatttttgttactggaaaccatttcgttgtacataaaattttgaattgccgcgtccctctactgccacatctagatactaacaatcttgagaagtgcttggtcagataatcatagctccagcactactgcatatgcactagctgctgataacctcaataaaccattaaatgcatatcttagttgtgtgagttctttgtgactttcttcttgactacacattgtcgaattacaataatctgtaaagtttgcaaagtaatttaagttctaagttttccagaaatttatggtatctgaagaggaaaatgtgatgaacaaatttaagagttattgcagatcttctgcttcactttttcactatattttgtttatttaaaaataaagatgttattagtgtacaatttctctgttatttttatcttagtaacataaatcatgttagattcagttagttttgatcctgtgacaaacatagacttgaaaagcctagctgcatgagagttacggttacttttaatttcttagtgatgttttcgagtattttctgaggtccatttggtccgtattgcag

SEQ ID NO: 764 - DNA, 441 bp, Solanum lycopersicum
  source 1..441: mol_type = genomic DNA
tgtacgttcatattaccttatttggacttttagtaagactattgaacaactccagtttcaattacttcccttagggcataaaggccttttaaaaaactggagtagatcctgcacatgacaaagtgaatttggactatgtagtcaattggaaccttgttgcatcaggtctttcctgaaacttattttcttaaatgcgaatggagagacagatttgtactcagggcgggtgggggcagttctagacatcgtattctcattttgagtctacactctactatggtcaactgatgatgccggtttcttgacttatatcatttagacaaagtggtgtttttgtggatgcaactggtgaaacacaactgacccccaccccccaattacctcaaaaaagaacaaggatctgtagtatggaaaattagtagatttgcggtcttgtttcag

SEQ ID NO: 765 - DNA, 174 bp, Solanum lycopersicum
  source 1..174: mol_type = genomic DNA
ggtgaattgcaactgatgctctttttccctagataatgtatctgatggaatcatgtgtttgtacatgttcttctaatttaggaaagtaaagatgagaaagtgttaatagacgaaataaagaagaaatgctatcttcaagggaagtactgattttttttattatgaacattgcag

SEQ ID NO: 766 - DNA, 408 bp, Solanum lycopersicum
  source 1..408: mol_type = genomic DNA
tgtaagctaccttgctcaacataatttgttgcagtagttttactctcttactcatgcttattggcaatcttgactttgacatggttccttgaattgaaaacttagttaattccggtaaaaatcgtatattaaatttgcattttaaaaggtaagagttactctacctgcttaggtgaacatgccaattctttcgattgcctcttggttagttgtttttttgttcttaagaagttctgtatgatttgactatgatctcttcttttgaggggattggtgtggaaaaaatgtgtaattatcatcaaagtgacaattagcatgtacttgatcatgaatattttgttcttgctgtcattgaactttttatcatatacctgattatgatacaaattctttgtctgtttactacag

SEQ ID NO: 767 - DNA, 1137 bp, Solanum lycopersicum
  source 1..1137: mol_type = genomic DNA
gtataattttctatttttttttgaatttttatcggatttcgttggaaatgtgaagtatattccggatctggttgattaatttgtttttaggttatgtgtgtttagattgaaggaacatgtgcattttaggtagatctgattgattatttacgattatgtgagtgtttttcagtagatctgatagaatgtagactgtccgattgatatcaaatgtgagaaaaatgctacagttctggttgatgatttatgactggtaatgtatgtgttttcagtagatctggtagattatttgggatatagattggatagctgtccggctgaattcaaatgtgaaaaaatgctgtagatctggtgaagtactgtagatctaggtttggtaactgtccggttgattaaaaatgtgatagatctgattgacatatagtatctaaaggttgcctggtgtagaaatgaacttttttaaaatagatctgtagggatatacggtggttagatctgtagtgtgatttaaaatttggaactattttggtagatctgattgaattatttaatggttgaaatcatatgaatccgattgttaaataatttgtttggaacttgttgatgtttaggttagatctgtagtgtgatttaaaatgtggaactattttggtagatctgattgaattattcaatggttgaaatcatatgaatcagattattaaataatttgtttggtcctggaatgttctaatgagatatgttattgtatcaattcagtttatatgcctgtgttgtactttagattgagtgggttctgatgttggatatattatatccttggttaaatctgtagatgtatgattgtgaatgttcacatgattaattttgaagtaggtgtatatttgtattatattttatttggcgtctcttgtgtttgagctgatgtatgatgctccattggtgttccttggttatatttctatgtgttgatggcttatcctgggaactttctttttccaacttgtcatccttggaaactagtttggtttattgtgttctgtaacgagctttaattgtttcctcgtggtttaaattttatggatctgcagcagcttgttgtgatttgctaatattctttcttctgttttccaaagc

SEQ ID NO: 768 - DNA, 80 bp, Solanum lycopersicum
  source 1..80: mol_type = genomic DNA
gtaagctaacctcctcaccaactcttactcaaatcatttggttttaaaagctgatagttttctttttgtctccttgtagt

SEQ ID NO: 769 - DNA, 78 bp, Solanum lycopersicum
  source 1..78: mol_type = genomic DNA
gtaatgtagaaatctatattggtttttggaatcaattagctccaattagctggtactaatgttttgcacctgtgcagg

SEQ ID NO: 770 - DNA, 73 bp, Solanum lycopersicum
  source 1..73: mol_type = genomic DNA
ggtgctcatcttctccattgctacacactataatcttcttctcaatcttaacaatttttgtttctatacacag

SEQ ID NO: 771 - DNA, 87 bp, Solanum lycopersicum
  source 1..87: mol_type = genomic DNA
ggtactaaaccctaaattctcctcgatttccatttttttttgctttttctattaactaattaagtgaaatactgtactgtaatttag

SEQ ID NO: 772 - DNA, 166 bp, Solanum lycopersicum
  source 1..166: mol_type = genomic DNA
agtaaggccaatttttttgaatttttgtagttaagtttgcagttttatgtgatttttcgcaaattttagttttgaagttctaagtcatctttagtttgttgatcatattgcaagtgtgtatgtttatgtattttgatgatatccttttctttttttggtggattag

SEQ ID NO: 773 - DNA, 158 bp, Solanum lycopersicum
  source 1..158: mol_type = genomic DNA
tgtaagtatgatgaaatatggtaaacaatgtttaaattatatatttgagcttgaaaaaaaaaagatgtttaatcatataagcacgaatatgaaactatataggtcgatgacatcaatacattgtaatattttcgatgtttcactttttttttaatcag

SEQ ID NO: 774 - DNA, 241 bp, Solanum lycopersicum
  source 1..241: mol_type = genomic DNA
ggtaccagggataattctctatgctttttaaagtataatatgaatttttttttctttggttctgcgggattttcaagtacatgtgtggtaaggagtggttattggagctattgaagctagattttatcaggaagattttaatggaatcgaaactagttgaactacaaagtatctatagccatgctttctggaatacctctatcgacaatcttttgtgtgtattttgtgtttatctgtgcag

SEQ ID NO: 775 - DNA, 662 bp, Solanum lycopersicum
  source 1..662: mol_type = genomic DNA
ggtaagtactgtaacatgttcattctttgaattaagcatttattcgttcaggtttggctgttgcattctctatgctgaaagttataggtggtgtatagttttcttgtaaaccagttatatgtacagatacacaatattttgtatggagtttgaatactcttttagtctacaactcattcttctttgtccgcaagtgatgccctagccagttagttggttggcaagtagccctatgttccagctggcatgaaaatattttctgctatcaatgcctaaagcagccgaatggttccccatctataattctattagtgcttctgtggatggtctaattcatattttctgggagatcttttagcgattagatatcatctgatatcccgtgtcaagcttctcagatgaccaatgagcattatgacaaggatattttgcggcaactcttccatagttgatgacccgatcttaaattttggacttgaaaatatttttctgttctcaaaattttacattaaggacactttgttcggagagaatatattttctgattggcttagcttttgtttgattttcagtagtagttggtactagaacatgcttagtttgtttattttgctatttacacctttatttcaagaatgagtaagtatgttttgcaatagcag

SEQ ID NO: 776 - DNA, 258 bp, Solanum lycopersicum
  source 1..258: mol_type = genomic DNA
ggtaacattttgtttcaagatttctttagatgcatggaaaatttgatgtgcatctgcttcttccagttgtgactcacacattagtaactatacttttgacatcaatgttggatttctctttccaattttttcattgagcattggcatgattttctgaaaacttttctgttgatttttcgaaaggtgtataaatgtaacttctttcagattaactagagttacagtggccattattttataatacttggggaattttag

SEQ ID NO: 777 - DNA, 1921 bp, Solanum lycopersicum
  source 1..1921: mol_type = genomic DNA
ggtatatatactctattttttccttctcattttttctgtctgaaaccagaatctggtaaatttatgtttaggctagaatcttgttattttggtcaaatctgcaatttttgaaataaatattataaggtgcatgcaccactagatcctggaatttagctgctcatggtctagctagcttcgctaattcacgtctgcataaggtctcttatgtgtttctcttagttggtttgtaaaaatgacatactgtcatccacgggacacctgttttaattgaagaagcaatgtgaagttccagtgttctagagaaagtaaatactccactagttggactatcaagacagagagatgtgtgtgtgacagtaggaatccccagctgctccatccttgatgggcaggttaccaacatttgtgcttgtgtgctacagtaggtggactagctcagggttgcgcaaattggcgccaaacaccactatcatttaaaaaaaattgtgatagtgtgttatcttacatatgtgctgtcctgcagactgaaatgagaataatgaatttaattgacaatatattgagacgaatccaaagagctgttctggtctcgtttccactgattttgggaactggaaggtaaggcaaaagagagcagaagtatagtaagtgggtaaattgaagagaaaagggaaattaaaatttgtaggcccaaaaggaaattatatccccatgttccctcctcttcctactgctaacaccaaatgatgaaaaggaaagatcagtacttttcctctgcttccctgatcttgactagttttccaagcattgaagttctccttgcctctccaaatgctgaagatagtgatccatcataaaatggtctctcagagaatttctctactcatcaattacttggatttggaattaggaatatcggaattcagagcaagaactttgaaatagggtcttgttgtccatggagaagcccaacagtttggtgaagaggaaaatttccctatggtttcttcagattgtcattttaatttcttttgtatatactggaaacaacctttctaccccacaaaggtaagggtaaagtccgcgtacatcctaacctacctaaaccacacttgtgggatgacattggatatgttgtttttgttaatgtctaagagattgctgttaagtgactaatcttctgattaggagtgggaaacaggcggattgagtaggatatggacaagtcaaaaacgagttaaacaaaaatggataaaatacctgaccaatcatatttaacacgaatggaagataggttactcactggataatatggacatccttattcttttatcaaaaaaaatatggacatccttattgtcgatattatcattgtggaatatggtgggtctaaattaccccaccaaagctgatcaaaattatcattatcatagtatcaagacaatacctactataacatagaaccaagagagctcattttactagttttatgtactactctaccacattattttgtgggggaaccaagagaatatcaactatttcctttgaacaatccaacaatgttaatatgcttatagttcagttattatgtcaaaccacattcacaaatttccaaaagaaatgaatttagcaaggcattgtgcttcctcgcaaataaaagtatttataacctgcttctttcctttctttctaaattctaggaaataacatagtactatatgactgtagcctatgtttaaaaaaaagtatatgatgtagcctgtagtttaatctactttgccctttaaattaccaaatcttaagtggacaatatagattgactcatatttaccatatgatcaccctttccgtcgttgatatagaacttttgttccttatagaaaatgtaacacttcttgctgtttatgcaaagcag

SEQ ID NO: 778 - DNA, 1369 bp, Solanum lycopersicum
  source 1..1369: mol_type = genomic DNA
ggtgatattatgttgctgaactttttaggcattatgaagtgattgtatgtatgcacacaagttggacctaagccttcattcttattaacctgttcatataattttccaactaccgacatacatgacagcattaactttgaaatatatagattgcttcattctatttttttgaagatctgataattgcttgtcccatgctttctaatcaacaataataccaataaagcttgtgtgtaaggtatgtatttgttaagtatgatcatagaagaacttacatattactaccctcattgcaagtttcttgatagacttgctgcactttctaaaaggggatcacgtttagttttccaggaattttaagcttacttcttgaaagttggtttaaggctattttgatgtagatcaaacttaatacatttcattttcagttacttaaggagaataggaagatttatcttgtacaccagtacgtttagcaataacttgcccaacgattggcccactttctttcttatggagcacctacttcttgatgaaattaaaaaagaagggtcagaatctattaaaaacacttatttatttgaagttgcactcagtgggaggaggtgtggaacggtgaataaatctctgttctttttaaattaataattcggctccccgaaatcctatgtttagggtgtctcatcaatgttttgttttctccatcctagttgtctcttatgataatccaagatctaaattatttactcccctcggttccagttcctgtgacaattttttagttcggtttaaaaaaacccggcagttttataagttcggaaatattaacacaaaccttctatttatccttaatgacaaacttttatcgtgacacgaatgttatggcatgtttaatgctacaagctttaaaagtctcccttctttgtgccattagttaccttaggagggctaaggaagaaacattaaggatgtcaagaagtttgctgaaatagaaaaactttactcttgaatatgcaattgcctgttcttggaaatgcagatgactgtcaacaactaactggaagtgctaactgtaccttgtaatcaacagtagggataaaaatggatgagataatctttttcttttgactaccgggaaatttgtctgaccgtcctttggaccaatcacaaccatctaaactcggtgaataataggccacccctctacccttctccacttaaatgccaggcttcgctttacatggtgtggggcttgaacctgtgacctaagccacaaatcctccaccttttgccactcgagctaggccttgggggcaaatgtatgaaatcatctttgttactcatgttctgtttcaattggttaaaccag

SEQ ID NO: 779 - DNA, 724 bp, Solanum lycopersicum
  source 1..724: mol_type = genomic DNA
ggtatggtggctttgtttctacattctatatggttggaaagtaacaattaagtcccttttttgttacagctttgtttatagcaccccagcattagaatgggacccaggataaggattctaagtaactttgatactggcatactgcaagcgtttttccttgtgtgttgcggaagtgggtggttataactggacatgaatcatgataacgttccgaaagtaattcatgttactgaggcatcagtcttcacagactcacagtaatggcatctatcctctttatttcttaaatagattttccgagcggctctcgccacctattgtgaaaggccatgaatcatgattagtacatccagtaccatcagtgctattgatgcacacccaagtacaagaaaatttctcattacccatagtctcaattctaggtaaaattatacaagaaaattgggattctgagagtgctattctatcactggcatgatatctttcattgtcattacttcactgtgattactgcttcaccttgatctccccaattgctctgtcagtgccttgttatctatgtagatgacctacagtctatacatatgttgttacttaaatctggaagtaaaaaaaattctgtgatattcttatgctttttaacaagaacatctgaaaattgctatttgacctttatgctgatcctccatgagttcatatgctaattgttaatgctattggacag

SEQ ID NO: 780 - DNA, 665 bp, Solanum lycopersicum
  source 1..665: mol_type = genomic DNA
ggtgagcattcagtaaaactatggattttagtttgcggaatgaaaaagttgagaagctcaattttttttatgctttgcttatagcaggggttattttcatttttatttcttggagcttttttaaatagggtgagacatataataaactgggaacttctttaatcggatgtttcaattgaatagttttgcagtcaataggctgcttatgccttagatctattgctcgtgaatccaaactgatttcacctttgtaatatccccaagtctatattcgataactttattccaaagatctatcatatgatgcaaagttcaatatatgataattagcacaaacttaactatcccttgttcttataataccggaacaaacttttcttctccttttctttataatttataaataatgcaaagttctaggatttttttggaaaaacataggttttctttgtcttcaagtgttgatacataatataattaaataattaaaaatgtactctcactaatggcttaagcttttagatgagatgattacacacttcagcatcaagcttgaagcagtttattaagttctcggcttctcctgtagtcttccctcaatgattttttaattgtctttcgtctttcttagccaacctgtctgtttttttaaaaaattctaacag

SEQ ID NO: 781 - DNA, 299 bp, Solanum lycopersicum
  source 1..299: mol_type = genomic DNA
agtaagtttcctaatattcaggaaaatacaaatttaaggtttttaactttatatgctagaaacacgtatagcccattactggatattcctcggtttggttatcaatatatgaacctgggaatgtatatccaaagtgtccttggtatgaatggagacaattagtggatgatgttcagtttaattgttcgatttatcaccttctattgtaatctaccacactgtttatattaactctagttatataggatgcatccttacatgaatacctaaatgcatgtttaatttattccactgtccag

SEQ ID NO: 782 - DNA, 476 bp, Solanum lycopersicum
  source 1..476: mol_type = genomic DNA
tgtatacctcttaacctcaaaatcttcttgtatttattttgctttttttgaagaggacgtgtgattaatgccatttgtttaactttcacattctaactcttcgaagataaattctgcttatgcctcgtaactttctggggcaacattttcaatgcaatatatgacaaggttactgctttacaagggagacaacttgaattgtctaatccagaaaagttattctttgatcatgattcaatgaaaatccaaaattaaattatgacatgcttttgcaattgaagctgagatatcatgtgagcaattgcgacatgatttgttgaacatgagattccatgttaacagttggacaaaaaaatttacagtatcaagttccatctgtatttcaaaagaaagaggcagatttggtacttgctgataaagatgaaaccttgaattcacaagggttgatattagtgcctgatagtttgataatacag

SEQ ID NO: 783 - DNA, 72 bp, Solanum lycopersicum
  source 1..72: mol_type = genomic DNA
ggtaagtcaagtatatatgatttcactaaatcctttctcctccttctgtgctcagttattgcatctaaatag

SEQ ID NO: 784 - DNA, 77 bp, Solanum lycopersicum
  source 1..77: mol_type = genomic DNA
ggtgataatagtaatgtattctataatgtggtagaatttggatactctttctgagccttgtttcatacaattgacag

SEQ ID NO: 785 - DNA, 74 bp, Solanum lycopersicum
  source 1..74: mol_type = genomic DNA
ggttagttgtttgaggcattaaacctatagttattgtcatgtggtttgaagcgtgatatttttcaactcttcag

SEQ ID NO: 786 - DNA, 315 bp, Solanum lycopersicum
  source 1..315: mol_type = genomic DNA
ggtttgttttgagtctagttttgccggaatttaaacagaaaaagaaaacaatggccctgttgctaaaagaagttggacataattatatatacatatcatcaatgaatattccaccctctgtttagaaattttttaaagcataactaggtgactgcatttggcatgttatcaggtaagtgctgataagtagaatgttcaaaattttccaagctatagaaatggtttaggagatcaccagtagtctagtatgctttgatgttttttgtttctaacaaaatagtatgcttttatctaactgctcactttcgtatccag

SEQ ID NO: 787 - DNA, 1349 bp, Solanum lycopersicum
  source 1..1349: mol_type = genomic DNA
ggtaagttttgagcttttgatttctttctattctagttgttatgtcattcttcaatatacatgtgcagacaatctcgtgtaccttatatcttctctttgccagatgcataatctggcgcttgatttaatcaaataaatttatatcagtcctgcccccattatcatcctaaggtttctatgtgtttggccttctcaaatatatccttcagatgcttagattgttttcagcatgctgaagaccataaatggggaaaacaaattgaaaagggaaaggagaacccaaaaataaatatatgagagttcctttgttccttaggaagatacacgtcttttgctctcgcttgttgatgagtacaaattagttgataagcatcacatactaatgatgccttttaagttttaaagtttattttataaataagtaattgtgtgttggagagggcaatatcggttaaagtagattcttcttttgttccatcaaaaccccttcacaaactgtacaagcttcttccaaagtatacggctttctggatgtagatgttgatatcaagtaccgaaacagataataagcagttgatatgtttggtgaagaatattgataatgacttttatcatataaaatgacttaaatgcttttgaagtagttcacactaaaaaggagttccattattttggcaccttgaaaaaaaggagctgattattgcaagattcttaattctaattgattcaactacaaattaacttatgtatcaattactctagattggtttgataggattatttttaataaatgtaaattattttgtgataaatgcaatagacctaagcacaaaagagagaagaacaaatggtgaaaatggaatgaagagggtgttaggcgttttctatgaaaggggtatttggaagtttaaaaggtattagggatgttgtcacgatagagcaatctatttaagatttgtgtatggaatgaatggataaagacaaattcttaagtgttcttttgttctgtttcggattcatgtaggacaccaacttgcacaaatatgaagcgtagtgattgttgttgttgccattttttccctgtatgtagattccttccccaactaatccaacttgttgaaatacatatgtaaaatggaccatgtgtgggtaaatatttggaatggactttgaaaaatctttggctcaaataggtgcaatagaaactattgtgattgggtacccatccttttttgcagcccttactgtccttgcagacttacatcatttcgttttcttctcatcttttattctgtttttatttagtaagttgctgtatttacatttacgtttgtatgtacatatcttag

SEQ ID NO: 788 - DNA, 716 bp, Solanum lycopersicum
  source 1..716: mol_type = genomic DNA
agtaagtagacactatttttattagacgttctgcttagtttccgtcacactattttttaacggctatatcctacattctggtggtaatatggctttgatacaatttagggctttgtattataagtaattctaaggaggtggtaaataatcaggcaaggtagctctcacaccacaattataaaaggaataaaaggagttgataaataataactatctattatagcattagctgaagtgtgtttctgtcactaatgaaataaatggcactgacgagtctgaacagcgtaatggggctgctaatcgcatcaactgacctgtaagactccactacagtgcttaatgaacagttgatgctacagagtattgttgcactgaacctattttggtgcataatttatgaataacatctcaattaaagatcaggagccttaagagggacaatcattgtattgtgtcgtgctttttgtttaataatcttagtttttgtagaatcctaagtggtacacttttacagttggtagaattcttctattcgaatatccaccagctcaatttgagattgctatatccaggatgctaaatgtacttatcttgttgagacaatattcttttaatgatgcataaggtgatacctgttcaaccatatcttgtaccatgcttcacttttaagtttgtatgagactctatagagttagtatcacttctatgcactgcag

SEQ ID NO: 789 - DNA, 290 bp, Solanum lycopersicum
  source 1..290: mol_type = genomic DNA
ggtacaaataaatgttgctctaatttatctatattcattttcaactcaggttttatacgtttgattttatttttgcttcagataagtgggaagggtaagggatgagttgggggattaatctaactgacgagggaattgaacggttacgattattatctttccttttcgtcctgtcaagacataattctcgtccttgcgttctgatttcttgttattgttatagtgctggtccataggtcgtgcaacactattgctattaacatttctctttcaactcctttgttgttcag

SEQ ID NO: 790 - DNA, 1236 bp, Solanum lycopersicum
  source 1..1236: mol_type = genomic DNA
ggtatacttttccttctttttagtttttttgtttattttttctatattttgtgctatttgttttgttgtgtctgtgtttagaatcagaattctgttttaaaaattcaatttttatgttgtttgagtgctgtgtatgctttaattttctgtattttttattgtgtctgtgtttagaatcagaaagggtgtttgaatctgttttaaaaattcaatgtttatgttgttttagtgttctgtatgctttaattttctgtatttttttgctatttgtttattgtgtctgtgtttggaatcagaaagggtgtttgaatctgttttaaaaattcaatctttatgttgtttgagtgtctgtatgatttaattttctgtattttgtgctatttggtttattgggtatctaaaaaagttggatcttgattttgttttcaatattctgtatgctttagttttctgttaattgtgttatttgttgtgtttgggtctggttttgaatcagaaagggctttttaattttgttctaaaagttaaatcttgattttgtttcaacctggtgtgtgccttaggtttctgtatttatggacttggaaaccttttaatgatctaaaaagattgtattttagttttgtttatgagctgaaaaaccatacaagtatgatctgaaaagttgagtcttgattttgactcaacttctgtatgtgttgttttggttatatgatagccgctgcttcatttcgttttctgttttttttttgtttgtgtgagctgagtttctatagcaatttcgcatacaccctctccgtactccacttgtgggatcacttgcacaatctatattgttgttgttgtatttttgacctgtgtgtttctgttgtttgtttgtttatgatataaagaaccttcctatttctatttgtaagaactcaatcttgattttggtttcaattttttgttgatgcaccaagttgaattttgtgtggtttttaaaatagcctctgcttatccctttaaatttctgttatttgtgttgtttggtctgtgtttatgatctaaagcctgtcaattattttgttttgaaaaaattggaagccttcttattggatgatgattatgaatggtgttctgttgggttttgatttgtgatatgaaatatcaactttaatctgtcatctcgttttatagagtcatgtctgtgtctattcgagtatgtgtgcttattttgttgaattttgtgtacag

SEQ ID NO: 791 - DNA, 1500 bp, Solanum lycopersicum
  source 1..1500: mol_type = genomic DNA
gtacaatctttactattgaatcttgatctttttattatgcacagtacatgtttgtggatattcctctataaagattgattctttggtgaaagaattttgtgggtgtcatttcttttggattgatcttttgatttggtggtctatgtgagtttaagatctttattattgtcaatcaatgtttgtggatgttgttttttaaataaagattgatactttggaggaagaatattctgggtgtcatttctttgatattttgatttggtggtgtgtgtgattttaaatatcttatagtcaatccatgtttgtgaatgtttgataacttggagaaataattttgtggttctcgaacctatgttgctcggattctttaaaaatgttgaagggtgtaattttggaggatccaacattgatgggacaatatttttgcagagtccaacattttcctctttttggattgatcatttagtttggtggtgtatgtgattttataatcattcttattctcaatcaatttttgtggttatttgctaataaagattgataatttggaaaaataattgtggtttacggatccatgttgctcggattcttcaaaaattgttgaagtgtgtttgtcgaatcctccaaaagtagtgtattttttgaggatccaaaacacgagtgcggcaacattttaggagagtacaagcaaccatttttctctttttggattgattgatttggtaatgtatgtgattctaaatctctctcattctcaataatggcggtgaatatttcttaataaagattgttaatttggagaaagaatcttattatttcctcctacgttgcttggactcttcaaaaatgttgaagggtgtgtgtcggatcctccaaaagtagtgtatttttggaggatccaacacaggcacgacaacatttctggagagtccaagcacctttttccttttctttggattgatcattgatttggttagtgtatgtggtaattttcatccttcttgtttgttgatttattttgcttgaaaaggataatagtttgactgttgaaggtggattgttcgatctgaaaatgggtatcttccatttgagtgaaatgtcaaaagctagaaatcattttatttaattgcttttggtttgttttttcttttcccattctttttggtagatctattttctttcaatctgttctttcaaagatatactattgattaagcttgcacctcaattggcatttccgttattttttatttttgaaatttttttttataacataaatatgatgtaatccaatcatatgatttcatccaatcaaattgcatgagatctttatatgttacagaaccattattctgttggagataaatgaaagagcttagctctatttattgctattgttctgtggattaggattttctcacttattgtggtgtttgatcttcgatattacacgaaatctatgtacgtttttggttttagtgacatgaatatattgttatc

SEQ ID NO: 792 - DNA, 110 bp, Solanum lycopersicum
  source 1..110: mol_type = genomic DNA
gtaactatgatatttcactggattctcctgaacttttggtctcattaaagatggcattggccttatttgttctgaatactgactgtgaatcttgtcttgaaattgttagg

SEQ ID NO: 793 - DNA, 220 bp, Solanum lycopersicum
  source 1..220: mol_type = genomic DNA
gtaagctctgccttcgctcaaccacttacaaatatttttgtcgaatgcgcgaaaccagcatttccactgaagtataaggttgattatttgttgaaacattgtgttgagtcctgtttattaggtaaaacagaattagtgaaaacatattacttattaagttatttcgtgttcctcaatataaaatcatgcgtctgactgtggattttctttttatgccagg

SEQ ID NO: 794 - DNA, 276 bp, Solanum lycopersicum
  source 1..276: mol_type = genomic DNA
gtacgtaaaatctatcaactttttgtggtctgattcatttcaaagttgcacatcttaaagcttattcactatcttcataagcagtagattgctttaacataaaaaccaatttgcttctatgactttactatgtttgagaaatttgaattatctgagagcaaatgctaaccaacccttcctatgctaaatgctgaactctttcaaaggaatgtgatgaacagttgtcaaggacgcgtaagatatttacttacgagatttcttttttcatggtacaga

SEQ ID NO: 795 - DNA, 87 bp, Solanum lycopersicum
  source 1..87: mol_type = genomic DNA
gtaatgaattgaaccatcaattattaacattttgattgaagaaattcgaaatgtgttctcagctgtagtatgtgtatcttatatagg

SEQ ID NO: 796 - DNA, 494 bp, Solanum lycopersicum
  source 1..494: mol_type = genomic DNA
gtaagatattcacattctgtacttccttttttctttttttggatgttgttcatgttccaattttctataattaaggatccgttcttactaggaatcagtctcatggatatttgtgacactttttttgatgatttgtttcggagatgtcattagttattactcatgattgtgagtatagatggagaagtgttagaaaagatgaggaaattcatggaatgattttactaacttggtaacaagtgaagaattaatctgtctaggttgttgagcgaaaagcatgataatacataaatcaaatctcaaaagatagttaaagaagacgtaacttgtggtggtttttgaaatgttttgataggcttttacttgatctgagggtctatcgaaaatagactctctatcttccaaggtatggtaagttctgcatacacttcccacgtcccatttgttgttgttggttaagatgaaaagtatatgattcttgtctgccttgtagg

SEQ ID NO: 797 - DNA, 85 bp, Solanum lycopersicum
  source 1..85: mol_type = genomic DNA
gtaattaagcatttagtttttcaattagtatactcgttagacgatgaaacgatgctcaaaatatttgtcttctttgaaatgtaga

SEQ ID NO: 798 - DNA, 74 bp, Solanum lycopersicum
  source 1..74: mol_type = genomic DNA
ggtttgtgtttaggcatttttgtttttgtacatctgtgcatttttttttgacgttttctgtgtttaattttcag

SEQ ID NO: 799 - DNA, 107 bp, Solanum lycopersicum
  source 1..107: mol_type = genomic DNA
tgtaagtcattgtttgcgctctcatctgtttgatttttgtatagttagttgttgtcagttcttttcgggttcacatggaatcatctgtttttaatctcatggaacag

SEQ ID NO: 800 - DNA, 835 bp, Solanum lycopersicum
  source 1..835: mol_type = genomic DNA
ggtaagtcaagatctggtctttcttattcgtttttttttgattttttgatggattgagctatgtgaaaatgtaaagaaaattgtgagatgcatgtggggattatgttttgagatctatggaagtggtaaaagagattgaatttgtttatctgaaatgggtattttttatattttggattgactagttagatgtagtgaatcaagtatttgaaggttgagctaatataattctggatctgatgaagtggatctatgttgaggttgatctgctatggatttgccttgatctactgtttgattatagttcaaatggttttgaatggtgttctgtagctctcttatggtgattgatgaataaattttgttaaaaatagaagaaaaaagccttctttttcgttggaactgaaattgattatgtccttttggctttttgattactttgtatctcaatgagatgtagcttagttgaaaatgagtgtggagtgactgaggggttttgcttttttgtctccgattggatcgaggagaagtaagttatagagcgagaagtacgtgatgcagtgtcatttggatttactggattgatagttgaatcatagagttttaagatattttcacttttgatttccctcttttatctatgttgggatgttgattgccaagtatccaatgtattgtcattttgatatgcttgatcgataggttttgacgtccgagttttaagatacatctgtattgggatattgtcttatctgtaaatcatctacctatgttgctgactaggtatctggactggatttagaattgcttattaatccgttgtttgtattggcag

SEQ ID NO: 801 - DNA, 126 bp, Solanum lycopersicum
  source 1..126: mol_type = genomic DNA
ggtcagtctttattttttttactttggtttacaattaccgactcacggtagttgaacaacgtgttctgttatattcttgagatgtttctgatttttttggtgaataattggattgtttgaatgtag

SEQ ID NO: 802 - DNA, 84 bp, Solanum lycopersicum
  source 1..84: mol_type = genomic DNA
ggttagtattagtactctcatgatccgaatcttcccttgttggaaagttgtttttgatctgacattatgagtgtcttttgacag

SEQ ID NO: 803 - DNA, 102 bp, Solanum lycopersicum
  source 1..102: mol_type = genomic DNA
agtctttgtttctttaatcttctcttgcatatacttttgccatattaaactgcattttgtactacgttgttgctaacttaaacttattccattcttgatcag

SEQ ID NO: 804 - DNA, 80 bp, Solanum lycopersicum
  source 1..80: mol_type = genomic DNA
ggtgctgctgctatttttacttctgttcacgagttcctttttatgttctcctgctaaagctattatgttatcgtccacag

SEQ ID NO: 805 - DNA, 134 bp, Solanum lycopersicum
  source 1..134: mol_type = genomic DNA
gtaatggtctttttcttctatcgattcaatcgtttgttgaagagatttagatttatgcaggtttttgtatcataaatgtatgaacagtattatatgaacggaatttacctttgttttgttgtttatcgattaga

SEQ ID NO: 806 - DNA, 853 bp, Solanum lycopersicum
  source 1..853: mol_type = genomic DNA
gtatgattagtttgtgtcgtatctagggtttttttatcacaatttgaaatggtgatgcttgcctttctgttgatgatttatagccttgaatttcgtccatttgcttgattttggtcactgtttaatagaaattgttcaagtttccaggtttgattaatgggtcctgtctagggatatctatgaataatttgaaaaaaacttccttttgatgtataatatatgctcttttttcttttatgttgatgatgttatagtcttgaatattgtcgtgttgttccatttggtttctatttgattgaaattgttcaagtttcccggttttattgtttgtgtcctagggatgtttatgattgaattacagaactaaattgaatggatgatgcatacttttgctgatgatgatttatagccttgaattttgtagatttgcttcatttattgtctccatttaatgaaattgttgaagtttctagcctctaagtttgattgattgtgtcttgtctagtttttttttttgcgaacaaattgaactagatttcaaacaaattgggagtctccaattttttgtttgttaactcttattgatctgttttttaatgtttatttcttgtacgggcactttgttattctctcctgataattctacattttgaacttgatttgatctacaatatatccaatgggtttgcatccctctaaaatgattagtatagtttgcactaggtaggagggaaattgcagaacctttgttttactttattttctttttggatttgcaaagattgctagttttgccatctctgcctgatcttgaaatagaagttttgacagttgtgcttcaatatatttcaga

SEQ ID NO: 807 - DNA, 132 bp, Solanum lycopersicum
  source 1..132: mol_type = genomic DNA
gtaatctcgacgaatttagaattatatgaaaatgattcaatatcgtgtttattaatcgtttagtgtttggcatgaatttagaatttaaaattgtatgagaatgattcaaaatcgtgtctatggatattgtag

SEQ ID NO: 808 - DNA, 69 bp, Solanum lycopersicum
  source 1..69: mol_type = genomic DNA
ggtaagtagagagaaagaaattttttgaaatttgagatttgaaattgagaaactggtaattttttctag

SEQ ID NO: 809 - DNA, 80 bp, Solanum lycopersicum
  source 1..80: mol_type = genomic DNA
ggtaacgttgatcatttattctctttttaacttcttcacatctaaaaatattaattttatgtttgttttttgaaatgtag

SEQ ID NO: 810 - DNA, 91 bp, Solanum lycopersicum
  source 1..91: mol_type = genomic DNA
gtgagtatctgttactcagtctctctttcagtgtcaaagtttagggctttcacgttgaattcagcgttttttttgtttgtttatgtacaga

SEQ ID NO: 811 - DNA, 1177 bp, Solanum lycopersicum
  source 1..1177: mol_type = genomic DNA
gtaagttaaaccctttttagccttgttagcttgcaaatttactaacattttcatgttccaaacctaacctttttggagtaactgttttaagcgtctaacttcccaagcaccagcattttaatagctaattcgagtcgagtgacctcgaaagaaagtgtaagtagcttgttataactgcagtgataatgtgaaaaacgaaatatgactggatgttattaccatgaaaccacaattgttaaagattgttctgcaaggtcttgtagctctaacatccaagaaagctaaaggagcagtcgaatgagtacagaaatatacttgctcttccgtacttataaaacagagaagggaaaaagaattacttctcttacctatctcagaaccagaaaatttaaatgatgctcccatatatttgtgcaaccatttcaatgtttcactttcagaaaatagataaaaatatagttggtgtatttattatattgcttgtacctggtgctgtagaatgttggttcaacgagggaagtccttgattgcactggaggatgtggtctgcggttaatgaagttagaatggaccatgggagaccagggttcaaatcccagtagaggcaaaaaaggtggatgataccatcaaaccttggtgatagaataatcacgtatatgtgttggtggaaggtattaagtaaccgttagattaattttgaagatggtaaggacaccaccattacccccgaaaaaaaagaagaaagaagatagaagtccccaatttcctacttagtcttgaacaataaaatttatagctgatgcagtgaaaagtttccctggaattatgtagataagatagctgccgagtttatcataaaagaagaagaagaagaaagatagctgctgagataattagcaagatctctctggttattctccttcttagattaattcaatatctagtatcttttgtcttctcaggattagttcaaatctttttctcattatggttgacacgtgaaatcttaaaatatcattagcaagtcagccgcttacaaacaaacctgccatgattgtgaatttctatatcactatgctattccttcatgtatacttatattttgcttctttttaactagtcacatacatgtatgtttttgtgtaagttgtctttgattttatgattttttaaaagg

SEQ ID NO: 812 - DNA, 85 bp, Solanum lycopersicum
  source 1..85: mol_type = genomic DNA
gtcagttttacaaatttatctagtaccatctcgagatgccatttccttatctttgttatctcagatgttggattgtcatgtcagg

SEQ ID NO: 813 - DNA, 2121 bp, Solanum lycopersicum
  source 1..2121: mol_type = genomic DNA
gtaattggtccttttcttttgttcatatgttgaaacaattcccttcttccattaattttttgttgcgtcaatgggaagtatgttactcttcatatttttcagctcaggtaagtggggatatgctttgctctgcctatgttgcatagtcgttctatacgtgtcttgtcctcctcttttagtgtggaagtaccttagaaaccctcactgtggatcttaacatcctaaggtggtgatatgtttctggtcttgtcctggcagtctggcagacatgctcgctgattgccgtgtcctgtgaaacatattttagaatattgtgcgaggcagacaaaatctcaatgattttctttttaatctcatttgttttagttgagattggtgagttgttctatttcacaatttccccgatagctgaaaggtggttttaagcaattcacagaatcaaagacatggtagagtttgttgcagggttgtgttgatcaagtatttctaatgccccccagaccaccattagccaatactgggcattcttcgttttggttttactacattgattactgcagtgccctcttgcgtaaaatgttgttcgaacccttcgattactgctgtgggttggtgattcgaacatgacactgctacaggtgtgaggttcgttctgtatctcatcaacattcggtggataatttgaccaagtaaaggtgaacagagaaccgaagaagacagagatgaagcacaaaggagaagaggaagaagacaagaaggaacagtaatttgattagtgtcaccatgtgtgtgtgtaaattttattcttcttcgaagtaggacaaaaagatccgaaattttaggcatttaaaccaccattcaactaaaacaggggactgacacactaggattatcttctgggaagccaccactgatctccaaggtggcaatgccttagggtaatatttgcctattatttggtgggcttggttttaagagaagtgcccgggcaaaaatattgtgttttaattggaccacaaagatagttcattatagatttagtgacaagatctataagaacaagattaattgagaattctcaaaaaaaaaataaataaactgagcaagaataattgactaacttggagatgggtagaggggcaggctattattcattgagttttgaactgtgtttctgctggtccttgggtatttctcagttataaaataaataaattgtgttaaatttggatcatttgacacaacaaaatatttaacataacttattaattaaccaaaaatggcttttagcgaaaatttatcttaagagtgagttatttttctatgttagaattattgattgttttatatattatgctttaatatagatccatataggtgatatctacttgttgggaataagcttgagtcttgttgaaacctacactctagaacctcttttacctgtgtcagacacttgcatatgtaccctttgcatctagattgccatgcagtctttgcgtgattgctcttatattaatgtaaataatgtcacattagtgattcatcctaaaaaggaaagacaattatgtagatactgcttgcaatctatttttgaagatcagactacaatttttttcccggagaattgtaacaagttgttatataaaggtagaccacacaagctgtgaagtcacccaaaacagtgtgaattatagttaagagttcctagatctaagcctccctacatgtaatctagaacattaaaaattgactgcgattcctctatgtattcttttttacactaaattgtgaaagtctaaacggttgatcttcaacttctggatagtgcttcgtttgtgttcaaaacatctctgattccttttattcaccaaatgcatgatgggacaatcctccatttctctttttgacttctttgatcacttgaattcctgctttatgtgaagaaatgtggtattactgattcatttgaagattaagagaaaaaagtcttccttatatgcttttcttgtgttacttttttgttcttttgtcccgtcatttggttaagttgatgcttgcctattgaagattgggagaaaaaagaacctttttcttctgctacttacattcctttacagg

SEQ ID NO: 814 - DNA, 1372 bp, Solanum lycopersicum
  source 1..1372: mol_type = genomic DNA
gtgagcaatgcgatctgtattttagcagtcttattacttcacattaaatcatgtcatttatcttttgggcattgtgtaataataatgtacatgatttcaagctttattattcctgaatgtgttgcctttttctgcctatttttgcgttttatgttaatttattggagaacacacttttattaggaggacgagaaaaatataagatgaaagcacatcctcaagttaagttaacatatttatcaatcctgtaggcccacatgtcttttctatttcaaaggggaaaggtatgagaattctaacagcttccttttatttaaaagtcattaacaaaccaacaaggttggtggtgaagatgtaagtactccttcatccttaaccaagaggtctcgggtttgggtctcctttgttagggagcgctcccccccacccccacccccacccccacccccaaacccaaacccaatgtgggacttcccggagtgaatccggatttagtcgggctccaatgtgggtatcggagaggtggagacagggtgggaagccataaaaagaagaagtcattaacatcagaagtttgttagtttgatgtgaatacaatatatatccaattaaacgaagtataaggtgatgggtacttttataattgatgaatgctaaaagtgcagctatttgtgatgaataaggacctagagcaccgatacagtgatgtagcaatatggagtagggtgaaagagaagggggaaatatgagaaaagagaggagagaagagcagtgagagtagaataaaacagaaatagagtgagagaagaatccacaaaagtgagattttagaagcagttcatctgtaaatctcttttgactagagcgattcttgtgccatgcttgagtaatttggacctatcaaaatacttctctaagctatcttccctattaaagaacaaatctaggtcaagttcccatcaaatttatgtctgtccaccttgactttttttataaggtcattgtggtcctcacaggtggtggatttctctcaaacataagatcacttattagggccttgcctggaattcctattcgtggtggtctgctaagttaggactgtcaactactgactggtgtactgatcaactgtttgtttgccaagaatggatccaaagtgtcaatataaaagccttatcttgtttaatttgtaataccttctagaatcagtcgagtccaaggaattactttccttaacaagaactgtctactgtgaaagaaattgtccatcatgaacccaaaaaagaggaaaggcagcctggtgtttgcattattatgtcatctgtatgcaaaatggaaattacagtggactgatgatcatctatttaacagg

SEQ ID NO: 815 - DNA, 195 bp, Solanum lycopersicum
  source 1..195: mol_type = genomic DNA
gtaagtgccttaacccacttctaatctttaatttgtagcgtcttaaacataaccttctttgtgctatttagtagtggaacttccacttttgattcaagaacaaagaaaaaataataaagaaagctgtagcttcataacattacaagatcattccactctagttgttaattttctcatggtactgttaatgctagg

SEQ ID NO: 816 - DNA, 5765 bp, Solanum lycopersicum
  source 1..5765: mol_type = genomic DNA
gtaggatgttatgttctacttactggctacccttttgaattacttatttgactattcttgtcaataatagagttcttttactgagatatctagtctcttagccgtaagatcatttataatatttgcattatctctttgtaccttctccttgaagtgggatatgaaaaaattgtagacttcatgacttctggtgcatgatggcatcttaattttagtatcttttcaccttgaatagttaaatttccatacatttacatctgtagcagtctaaattttattcataactgtatgatgatcgatgagcgaatggtgaaaatgagagaatctcaagtaggctagcatcttattcgttaagaattatgtttgagaatatggagatatgatgtctatctttgcaatcagtattaagaatatgtgataatgtgaattatagaaatgctataatgctctagtttagattaggtggatactattctgtattgttgctctagtttatattaggtggatactattctgtattgttattctctttcaatctccactattgcttagtatacctgtaatacccttccatttcaatcatctttttaataattctagtatgcgatgtcttctgtttcttgagcaagtaccagttttgtatatttaagcaaaaaaactcaataggttgtgctgaaaccatattttcaatggggaaaaaagaacagaaatctaggatattaatgattgaagcagtgtcttctatgtagttctgtttacaccaaaaccaaaaaaagtttatcgcaggtctacttggtcctctgtactgagttgcaactatcttcaaaacatctggaattcctctttccaaattgtccatcatatacaagttgggataatcctcgatctctctctctctctctctgaagttcctttcttttgcctcttcccagccaaacaagactccaattatttttcttggcattgtccgggcagtgttttgggaagcgagaagcggaaaaaagcgacgagggcttgcttcacagaagcgagaagcgtgaagcgaagcgcgtgcgctttttttaaaaaaagcgacatttagtataaaaataaaaaaaatattaaataactaaatagaggtaatatagtcttagattgaatgaaattacataggcaaaaatactcataagtcataacatgtaaagcaaaaaatcaaaaacataatttaatcacaaagattcaaactcctattcttcaacaaggctgctaaactaatcacaaaattaaaaaaaaagaagcaaaagaattgaaaaaaaaatagaggaggcaacagtcagtaattagaaacagagcaggcaacagagattaagaaaaagaagagaagaagaagaaaaaactagagtagtggaaactcagagagacgaagagatgaagcacaggcgaagattgtatatttcaggagaaaagaaactcatagagatgaactaataaacattagctaaaaaagagatgaacaaaaagttacctgcagttgcggtcgaggttgaagagagaggcagcctcagtcgagatcgtcaggagagagaagtattgtgaaagaagagtcgcgaggagagaaagaagggaaagagtcgtcaaagaagagtcgtgaggagagaggaggttatatttcagattattttttttaaaaaaaccaattttttttaaaaaaaccctatttgtcgctttttttttatttataaaaagcgcgctttattgcgcttttgccttaggttcgcttctcgcttcttcatctgaagcgagagctttttcagatcgcctcgcctcaagattaaaaaacgcacaagggtcgccttgctttgaagcgcgcttcaagcgcgcttttctgcgcttttcataacattgtgtccgggcaatgctctgagacttgtggaaatcttccatagcatgtttgctgcttgtcctgcattttagggatacatgctgactggctcagcctctttggagaaatctctctcctactaaggttgtctttagtcgtaactgctttcttagctaataacaaggtaaaatatgctaccttaaaaggtataccaccctaaagagtcttgttgccaccataatgtgtttccatttgtactcatctaactgcttgtaaagttctactaatgtagccacttcccgatcatttggattccttctgaactatttattccatgtatattccatccttgaggagaccgtgcttcttttactgtctgctattgttttagtcatgaatgccaggaaaatgttctttgaggcaagtattacctaaccacttaatcccaaaaagacgttttgcacccattttatatcctgataatagagtgatccctcactagtggcctaaatgttcttatagatctccgcaagctctatccataagatgagtgcactttctttgagatccacctgttatcttcaccatattcactttgataatacttcctaataaacttggggttcatgggaacatccccatagccatttagttttgagtcccttgctgtataactttagtttcctagtgcctaaaaagccctgcctcctccaaagtagaacattgctccacttgactctgtaaaaactaaaaaatctttttatccttattaccttgtcatataataaggctattcttccttaattacaatgattacattgattttgttgtacaagaacaagggtgacattcacaattgcaacaaatataggggtattaagctgctaagccacattatgaaggtttgagaaggggtggtggagataagggtgaggagggatgcgattcttttctagaataagtttgatttaatgttgggactcctagctacataagccattcatcttgtaagaagactagtagagtagaatagagagaggaaggttctattgagatgcttggaggctaggggtgaacttgtgatgtactctaggacaatcaaggacatgtatgatggagctaagattcttgtaaagacaataggaagagactcagagcacttacctattttgatagggttgcaccacaaatcaacccttaactcatttttatttgtgttgatcttggatgaatcgatgtggaaaatccaaagtgaagttccatgtggcaaatccaaagtgaagtgccatggtgtatgttatttggggatgccgtagttttgattaatgactcttgtcaatagtaagctagaggtttggagacagatttaggagtctaaagggttcagactgagcaggctcaagacataatacttggagtgcaagtttagtgtcataacatataagtctggcgtggaagtgaggcttgacatataaatcatccaaaagagaggaagtttcaagtatcttgggtctgttattgaaggaaatggggagattgacgaggatgtcactcaccgtattggtgcagggttagtaaaatggaggcttgagtcagagttttgtgtgatatgaaggtaccacaaaacttaaaaggcaagttctacagagtggtggttagacctattatgttgcatggggcatagtgttggctagtagtgatctttaagttcaaaagatagaagttgtacaaatgaggatcttgcgatggatgcgtgggcatactaggagagattagattagaaatgaggatatatgagacaagctgggagcgactttggtgaggacaagaagcaggaagtgaaattgagataattcgggcatgttaagaggagatgcatggatgtccaagtgcggaggtgtgagaggttggctatgaattgtttcaggagaggtagggatagattgaagtagtggggagaggtgatagacatgacacttttttggcttatcaaggactagaggtagggggttgtggagggcacatattagggtaggaggttattaggtgtgcattgtcttgctatttgtccatatcagtgttgcgaaaggcgctctccatagcgcctttggcgaatggcgaggcgaggctgtgtcgccattatccactgaggcgaggcgacctcaaataggcgactcgaggcgacccaatggcgacgtaaatggcgtcgccattttgatttttttaaaaaacttttaacttaataatatcaggttttttttttctattttcaaactttcatcagacttctgtgtattcctcttcttctcttcctcgtgtcactgctgcttcttctattcctcagtcgctgctctcttcttctcttcctcagtcgctgctctcttctttgtctctttccctcgagttgctgctccattcgtctctttctctttcactcttcactgctccctgccttcactattcttttttttcctttatttttttcactctctgttttgtcccggattactgtagaatgttttctgctttcactgtgttgtgactgttgtcaattatttttttgaaaaaaattaattatactatagtaattattatagtatttgtaatatatgtaattgctattgaaattttgaatattatatgtgcaaaaatgtttttaatctttggtattaattggcgcctcgattcaaaaaggcaagcgcctcgccgctcacctcgccgcgtggcaaggcaggcccttgtcgccttttgtcgcctctcgccgtccaaaacactggtccatattagtagtcgtagtattgcttttgtagtttcttgtcttccaatttttgttactacatgttttttatacttcaattatcgtattattttgttgtagctatagttcagaatgctttggtatgctttcactcctttgtttattctttttctggactgctttgaattgttttttcttgagccgtaggtctatcgtaaacaacctgtgtacctaccacattacctgtctacctctgtggtaggcgtaaggtctgcatacaccataccctttccaaaaccatactaggtgggactagactgagtatgttactgttatcaattgttcactcgaaccaagataataacattttggagatccatacattggtgcatggtagaaacttcaattatattcgtatgcttgggctgacataggtaaatgatgccttggaaaagtatgaggattagaaagacttgtacccgtggggatctggaagtgcttggagaggctggtgtagaatgatctggtacctttgttccaacttataatatctagatatattcaaaggtatagctatcttgacattaaaatcataattcatacatactctagaaagaatgatagagcacagacacaggaatcatccattcaatcaactacgcatcatatgtgcaatcatggacacaaaattaaagcgcatgttatcaaataacatttaagggtatgacctagggtcaatgaagtgggtacaaaccttcaaaaccagggttcaaattccagcagagacaaaaacaatatgtgatttcttcccatctaccttaaacttggtgggcaaagtcatctggttggagatagcagatacccgatgaaatactctagaagaaaaacggtatttggtttagaatacagtgttgtacacttttattacccaatgaaatagtctagaggaaaaaagttatctggtatacagtgttctacacttctattaaattggttaaagaatgttttgcatttttctatggctttggatccaggcaaatttgcatctttttctatttaggaaacggaatgcattgtttttcttgcattttttatttgttgtttattgagcattactaaagagatgtctgaactaattggttcagt

SEQ ID NO: 817 - DNA, 1225 bp, Solanum lycopersicum
  source 1..1225: mol_type = genomic DNA
gtatctctcaacaaagaacaactgcttaaatgtgttattgccccttttttttacttttgcttttctgactgtaagaacttgactggtcaaaagagatcaacataagagcgggggttttaccctgtgcgcactcaaaggatagcagctgcaggtttcccttgtcataaaaattaaataaaaaagatatcaacggatgatcatttttacatattttgttgagctattgtaagatagctacttccagtttgcagtattatgacctctttcagtttcttccttttacaaattaaatattttatttcctagcattagcagacttccacttaacactgtagagatctcccattaatgtttgtatatctgacatgcttcggtaaactgtttaattgctctgacgcaaattactttgtttccgaatctgctaatcgttctccctcactgtcaaaacttaaaaaaaaaagagaagaaaaaataggaaggaaagaagcaaatgcctatgatatcttttgtacttccccatggtatgcactgagggcctcaagttatagctcgcgagaatttctttgagagaactgacattttcccctcgaatagaagctttaagtagctattcattcatagaattttcctacttttccctatattgtaatctagagtgaagaagaaatcaagtccaggacatgcattctaaggtggaaaatcgactttttatgaggattgatcaaatctattttaggtgttgaagggggtaggtctctctagatgaaaatttaagatgtaattttttgtctatgggaggtagaaggagaaaaagggtttcatgttcaggttcattagcccttctctttgcttgggaggcagggtctaagctgctcatgaacttgtaaaatctgttttatttcgggaagtaagggaaaagtgaagtggttatggatgttaagtcttcaccagatgttctgtgcattgtttccaacttctcgaagttctgttttggttgtagtctctggtgcaacaatactactccatgttttagagctagaggctgtattttactttcttagttctttccttacattgtaaagttctcttttgatgtactttttccccagcattttcttaatgctggttgtgtaacgtcaataatcttactttattactcataataaaaagttctgttttggtttcattgaataggtatgttataatactttaatttgataacagg

SEQ ID NO: 818 - DNA, 104 bp, Solanum lycopersicum
  source 1..104: mol_type = genomic DNA
gttagatatttatcgtcagttatcattaagacttatttgaatacaatgatctgttttttcttgaaacaaatttttttctttcctttttcctgtttatttctaga

SEQ ID NO: 819 - DNA, 492 bp, Solanum lycopersicum
  source 1..492: mol_type = genomic DNA
gtagaacatccttgcttcagtgctataaccagtctaattgtttaatccttcacataaattgtacgtttgtaactttcaagtattcaggcttatgtatcttcgtaacttttctttttcaatacaagaaaaaaagagaaccagattacaacaatatagccagtgagaacctgattgtgacttaaaatgaatttgtgctcaacttttgtcttacatcaaagatgttgtacttgggtgtcatagctttctcctgcatcaagtttttcttgctcaaaactttcatgctttgtttctgaagagttcattctgtttgcattaaatactggttcttctttagccagtcgcatcaaatggaggcatcatagaaagcctaattttgtcattggcaaataggcatctgatttgcatggtctgctagcactgtagtgcttaatgccttttaatttgtaatatattgatagatttgttgctaatattcatgatttgtttcacaga

SEQ ID NO: 820 - DNA, 70 bp, Solanum lycopersicum
  source 1..70: mol_type = genomic DNA
gttaattattcttagcattcctttcttcagttgtttctctcagctgctcagtatttttctatttcgcaga

SEQ ID NO: 821 - DNA, 815 bp, Solanum lycopersicum
  source 1..815: mol_type = genomic DNA
gtttctttctcctctcagctattatattcttatactcatcttgatttcattgattctgttaatcatgtaagttcctttgaagatacaaatgtatccaaatgtgagtgggcagttcactaaatagtttacttccattctgaatcaaatgccttcatgcccttttagggtcaaatttggaaatagttacattgtccttgcggaatgtaattgagatattcaaaagctacatgtcatttacgatgacattctattagtcaaagaaaatctgttgactcgcaaaaagaatttttttttactaatgaacgaaggtagcgtctgatcctcatctagcataggtattaaatactatgttgtttcctcttcctcatccaactctgccgcaacagtttttattttattttattcatcctcccccccccccaaatgtaggagaaatttacaggcaatgaaatgttgatctaagtgtagtgaaaagcgatgattcctgaagatattgctaacactctataatgtgttgtcgactgaaatgaaagacttatctcttctgtaatccctggatcagctattaatcccttatctaaaaggaaatagaaaaagaaagattgaaaaaagtaacttcctcatcgaataagatgtcactcatatcttttgtccagtctttaagaccttttgagtatatattcttgctcatgaggacaattaagattgcttcaagtcctaatgacacttaatttgttttttttgaatttattctatatgaagtatgtttgttttgaagtttgaaaatattatgctgcttctctgtttcgtgcaga

SEQ ID NO: 822 - DNA, 519 bp, Solanum lycopersicum
  source 1..519: mol_type = genomic DNA
gtaagtgttgtactcttgctctgtttctattggtgaatgagtgattcagtttccttgaaatatttggttgaagatctaaatgcaaaaactgagaacagtttcacttagtacttcgtaaattactcttttttggtataaactcgaagccttgtgatagtaatttttctgtccaagattattcggcttcatctgttcagacttcagagttactgctgtgttcttattttgattaacctatgccttgtcaaaaacatacagaccaccttccttaattggcaaagtccatcatttgaatactaactgaagattgaattactttacaagtttatatatttttcgacgcgacaataccttctcatattacttaaatatctaacaacctcatatataggaactcattactgttctcttacccattgcattaggtcaatgagatttgtttgggtggggtgggtgggggtgggggcgtagggtggcattccttactagggttaacattttgttgctttatgacacagg

SEQ ID NO: 823 - DNA, 761 bp, Solanum lycopersicum
  source 1..761: mol_type = genomic DNA
gttggtgttgctttagtcttccacattcaggtttcttgttcagcttgcttatcttatgtgagtaggatggatgtgtactgttttttgcacacactttcatcttgttttttccaggattctgtatttttaggtttatcctaagatgttgtatctgtagtgcttcttgctttgctcccttctgttgttgtatttgttgctttttatttattgatccttcggaagtagggtgtacttgtagctgaagcactgattggtatgatctgtaaactgggttttttccattgcattgaatgagaactatattttaaggactattttgatagtaaatgaggtttatggactttgctgtgctgatttgcatacctttagtattgttcgcacaatttggtttgacattacctttttacggtggcatctcatttccttgtatctcaaatgttcactgaaaggtttataatatttggatcacacaatagtgggatgtttctagggtgacacttccatgacccctctaccttgagattcagattattttttccattgccaaagatagagatatccatctgtaatgacttctgataaaatatttcttgtgttttttttttctgtatattgtcatatgatttcaaatgcagtagtgttctgtctgcctaaaaatacctggtatttggagaatctgtcctctgccatgttaagcgagctccttcagatccttcatatatatagtcttacttggtatttttcttgactgatgtcacaga

SEQ ID NO: 824 - DNA, 129 bp, Solanum lycopersicum
  source 1..129: mol_type = genomic DNA
gttggtcctttctctctcaaatttggccgtatagataatatatcggttaaggacatgagtccttcaaatgttcttctttcaccttctctttgttttttcaactaataattatacttgaaacttttcagg

SEQ ID NO: 825 - DNA, 467 bp, Solanum lycopersicum
  source 1..467: mol_type = genomic DNA
gtaaagccatcagcatttcttgcaatctatttaaagatgaggcatcggttccttttcttttgtgtgcctcctttctttcctatcgttgtttacattgaaatacttgtcaagtcacccgacaaagtattcatttaaatccccattatcacattgtatgcactgaaactgagaggatgcttccttcaggagaagaggatggaaactgcatgactaagtaactttaattttaaaactggagtgatgctccttatgacataataaataaaaattactatttgtgttgaaaaacaatatgaaaaactcaataggagattaaaaccaatatccaaatttatcactggattaattatcttcagtcatttttacccactgcgagcatatgaatttccccaaacttattttatttcgtctatttgagtatgaatcttttgatgagatgctagtttgacttcactgcccactacagc

SEQ ID NO: 826 - DNA, 136 bp, Solanum lycopersicum
  source 1..136: mol_type = genomic DNA
gtgccgtttcccttttgactcttaactatgccctctccttcattcatgcatgtaatcgtgttcaaggatagcattctcatcttatctccttagcttgaatagcctaattctgtatcttgtttacgcttctttcagg

SEQ ID NO: 827 - DNA, 431 bp, Solanum lycopersicum
  source 1..431: mol_type = genomic DNA
gttaaactattactctgtagtcctctttactgtttcacagtttctcttcatagtagtagttccttttgatattgagtgtataaagtaaacttagatgctttcaactgtataaagtgtgtttttctacttaattttctcatctggatgtaacaactttcacggactgtgttggacttctccccatatttgtcacttctaagtttaagctgacaacattttgtgagagtacaatttcaagtatcttgttttttggtctcccttgtcctgaccccgtctaattgcagtgttgagaaagcagtaaacgtacttccatttattttaatgctattactacatacaatcttgaaatggtaatttgaagaagatttacaacagtgttccataatggggagctttcttcacacgagtgaactaacaagttattgtgcagt

SEQ ID NO: 828 - DNA, 145 bp, Solanum lycopersicum
  source 1..145: mol_type = genomic DNA
gtaagttttacttctgtcgcttagtcttgaatacaatactacacttggcaagcaagcgttttgtttcctttgaagtagcactgtgaatctgttataactatagttctcttagtgattacaccttttggtttttgccaatgacagg

SEQ ID NO: 829 - DNA, 824 bp, Solanum lycopersicum
  source 1..824: mol_type = genomic DNA
ggtatgaaaaaaaaaataattcaattttgcttctaaaatttagatattctaaaactatgcgaaaaatgttataagttgcaattcttctcgtatttgatgaaatcatgtgttcaagtaaaagttttgatggataaataaataatgaaataattgaagtgtgtgtgaactgtttgatgttaatcacctcaatcgacaatgatagctatatgctctggtgttgtgattaatggatggagtttgttcgtatgatgcctgaatgaacgcatgcaaacgtataaagtagtatttgtctctgttaatgtacatttgtagatgtatagtatttgataagatatgtagtttatggaaatataagaagcattttggacaaaacatatggagaaattgtggatagacaagttcatatataatttgatctataatgcaccttcgtggtgagacacgtataaaagaagagctgggattatgatatatgatgtactttcatcttttttcagtaaatgatttgaattaacattgaaaagttggattcgatcaccttgttttttgttctgttgaaattaatcaaggatcttactgcctagtgtcttttctcaaaacttatagtacaaatcagaatgttatataaaaaaaaaatcgtacaatgatccatgattttttggagatacgaacgcctaagctttgtagaacgagaatttctcacaaatgctttagtcttttctgaatttttgaacataaatgaattttatctatattttaaattggacctctgttttagtttattttatttatttacaatctttgttttttgttttatgagccag

SEQ ID NO: 830 - DNA, 243 bp, Solanum lycopersicum
  source 1..243: mol_type = genomic DNA
tgtaagtttctctctttgatattaactcatacgatcatactcttttcattttagaacgttccaaatgtgtcgcatcattcctaaaataacggagtgttattacatttaaccttctacctcgaactttattataaaaagggcaattactaattctaaatcctgatgtaaaaacattgagtttagtcaagcaacgttgtataaattgatagtttgatacgaatggagtatcctttttgtttgcag

SEQ ID NO: 831 - DNA, 89 bp, Sorghum bicolor
  source 1..89: mol_type = genomic DNA
gttcgatgctcgttctctctgttcattcattcatctctgaaacctgtaaaaggagttgttagagaacctatgcttctcctctctgcagg

SEQ ID NO: 832 - DNA, 108 bp, Sorghum bicolor
  source 1..108: mol_type = genomic DNA
gcacgtgttcatttcacctattaactgatgagtttttctaggacaactttatctttgcctcttgtcattggtgatctgaccccattctacttatgtcttgtatgcagg

SEQ ID NO: 833 - DNA, 290 bp, Sorghum bicolor
  source 1..290: mol_type = genomic DNA
gtacttactatcatggcactttccttgttgtcatagcatttatgatgttatcatggagatggtttcttaggtgccttttgatcatcttccttttttaagtgaaaccaacaatcaaccaaattaacaagtgcatgtgaacacatctaaatcagtaaattgtgaatggcaatgttccagtgatttttattgtcgccatagctttgaatacgaactaatatccactcaatttcgaagtattgttttttttttacagtatatgcttcttactccaatcattttcctgttgcaga

SEQ ID NO: 834 - DNA, 1363 bp, Sorghum bicolor
  source 1..1363: mol_type = genomic DNA
ggtatttactctgcccaatcccatccctcgcgctctccgattttcatagcttttccgcttctgattagggttattagatccggttgggttgggagcgttaaaatctatagtccagatccgagtccttggggatatgaatgacattaaaatgacctccaattggcatttctgcgaggtgcttttttcatcgtcggtcgcatttactagtaattttcgtcctgtgtgctgatgaatatgccaagtggcccgtgttattgttaagcattagcctctagccctctaggtaggttgttatgccagtacatgcacttaaagtattgcttgttcctgtggattcggctattttttctacctagcatgatggaatgatgattggtaattccgttattgggtaagcaatcgtacagtctgcgtcggatcacttgaacagaaaaaatcatagctacagtaattattgtgtttagtctattttgtggttatattggcgctttcatgatggaactctctagaggtttgctagtcaatggaactctgtagatgttttctagtcaatttgtctgtcttcaactcttcatgtatactcttgttgattcatgttgaactcctgtaccatttctctgggcgaagtagctggaccgacatcaactgttggtagggtgaatattttattaatgtatcattcatgagtgttgggtgtgttagcttggagttccgctctgggagcctataaattttaatgaccttttctctgggctaagtagctggaccggcatcaactgtcagtaggatggatattttattattaatgtaacatgagttggttgtgttagcttggaattccactctgggagcctacaacttctattaaaaggtcaaattaaatattgcgtcgtagctggactgaattctttggccaacaccaaacaaaatggattccatgtcttcatgtatggtgaatataacaaaatggattccatgtcttcatggtgaatatagcagtgctgaactttatgtctcttgaaatttaatccctatatggttgttctgtgttaatataaactatggtgtgcccaagtgaagtatctggtatcatgtcaagatcagttcatgggctagtagagcatggtggtagtatgttgtgaaattgactgaattcaaaatatcacttaactgtggtaacatgaacacatgattgatgattgttaacaaactctagtcacatagaacgcatcacattctgatatcttgagaccttcaagtgttgctgtatctttccaacccatctagtctgattacatttttcatgctgggaatgttgtttgtgtttgtggataattgaatgactcatttgatttacttacag

SEQ ID NO: 835 - DNA, 99 bp, Sorghum bicolor
  source 1..99: mol_type = genomic DNA
tgtaagttaatcctcattaattcttttaaaaacatcgatatccagtagtttgtatcctattgaaagggctggtactgatggcgagttctaatgatgcag

SEQ ID NO: 836 - DNA, 1099 bp, Sorghum bicolor
  source 1..1099: mol_type = genomic DNA
ggttcgatcgcgtcatgttgtcctcctcgctatgcattcccatcatcgtcttcgattgatttctgatatgttgtcgaggagctctacgatttgcagttgcagggcgttagtactcgaatcggggtgaagtggttaggttattttttcgtcagatctgttggtagtactggtagctctagggtttgaaatttcctgcgcgatttaaactgcgatcatcatgtgtttgggtgtattgtggattttgtttgcgattaatactttgcggcggaaataacatgctgttccgatcgaattttatatctcgtattctcccgtttgttggtggtcacgcctattctcagtcggattgcgatgtcgtaattagtcatcggccgttccgtggtcggtttggatctgttttgtgcgtggatgaactgcactatctctgtatctgttattgtcgactaggagttgattgaattctcattatcatttcgtgaatcaagctttgattctgtaagttttactcatgttgttttcatttcttcgatctgattccaaattggtctaggggaatgatgctttagtttgtgctgtttaattgtaataaaataaaatttctctctgaactgcgcgatttctgtatctgttattgtcgatttctgattctgtaaattttagtcatattgttttcatttctgcgatctgattgcaaattggtctaagggagtgatgctttagtttgttatgtgcaactgtaatttaactgtaatgaaatttctttttcctatgaactgcgaaatctctgtttgtcgtctaggagttgattgaattgtacttttatttcgtgaatcaagctctgattctgtaaaattgcctacgttctttccatttcttagatctgatcccaaatgagaatataggaatgccgctttaggttgtgctgtgcaactatggcggaattgaaatttccatttcctattaatttgagttgccactttgttcctctgaactgaatctaatactaattaaatcgatggtatgctggacccttgcaacgcaactttgatccttcacgatatgatctgaattgcatttaatacctttctgatcttcgcag

SEQ ID NO: 837 - DNA, 103 bp, Sorghum bicolor
  source 1..103: mol_type = genomic DNA
agtaattgaccatctaaaaactttgcctgttccacagaattagctcatctcaactcatttatggttgattgattactgatgcatcatgctctttttcctgcag

SEQ ID NO: 838 - DNA, 124 bp, Sorghum bicolor
  source 1..124: mol_type = genomic DNA
ggtagaacaattgctttatactgggggatgtgctggttttgttcatacatatgtgctctgattttgttcatacatccttgaaaccgatgctaaaatgtatgccttaaactgttttggtgtgcag

SEQ ID NO: 839 - DNA, 1927 bp, Sorghum bicolor
  source 1..1927: mol_type = genomic DNA
ggtatgatatgcacttataccgacctacctacacatcaatcaatcccacgctaggcttggctaggtgttcggtgttcctttcgtcgatctcgtgtttcctccgtggatcggtcgtgctctgtttcgtgcgtcaactctgctccttatggcattgcctgtttctggaatctgtttcatagatcagccatttgagcgtggtactacttagaaaaaaggaatacaaatgcaacgaacacccgatttcgttccaaatctgtcacactagtttttttatttgtcacgtaaattgtaaatctgcaatcatcctgcatttccgcctcttatagccatatagagggatcagagatgcacgcgatcgttggatcagtcaatgcttgatcccttctcgtgaggacaggaatagcactaacactaatacgccggcttagcagcatgtacagacaggccttgataggtagcagatcgtccagtacagttggtgtcaatttggtgaatttgaactcttcaaggaatatagattcaaggaaactatatatttttatatcgatttattgactgtatccaaagaatacctggtttagtagcaggattcattgaaagatcaatatcatttttccttttctgatcattcttactgcagtagtactgttcaactgataattccattgagatggttcagcatttatctgcattcatcttggatgcttatgatcagttgaatgaaattactgaagctttgtgataaggagccaaatatgacaattttctaattgtttgctagacacacccacggacttaataattgcagatttgaagtagaaactcgatgctacacaacattcataatattagatgagctctgtcattcttttttatcttaattgaccagttgacagttacatttgtgtgtgtcggtgtagctattttttaaccaaaagtaatcatgaggttattgcttaatagttcatacacacactgcagttctgaaaagaagttagattagacctgtctcacctgttgctcagtttttctctgcaatctgtgtactgcaactttgctagtggcaacggggccatgtgttttcaactaaaatatttatcagtgggtacatagaaacatgatcatggccaagcggaacttattgccatgcatttgttgtcctcgtaccaagctatgactagttaagcacagatttagctggccaagtgccctgtctgtgaatgttagtttcatcgctagctatatgtgaaatttttactgaacataaaaagacacaaattgctgattgtaaaatttactcctctgttttctagactagagactagagatatgggtttcagtactttcaggtactaatgacctggtttgtctcggttagaaaccagttttcagtactgaagcatgttacatcacatgtcaacgtcttcttaggctggtgaaagttcttgagattatctcaataacacactaataatggtattatcattctctgattaatgacaatgctgtacgacctaccaaaataaaaaaagcaagtatctagatctgctgctactgtaacagtgtcggtggtggttgcaacgaatgagacactgagacaggctgtacccagtgggctggtggttgggaggattactcatgtgttgcttacttgcttagtgtatatacttgcattattgcatttggacttgtatgaggtgaaatggattttagcgcatctaatcaaagcagcatgataaaaaacataaagtcagttatacaatacataacttgacactgtactatatgattattgagatcaagtttcctgcggttcatgccttttcgatgggctttgtacatgatcgaagtttgcacaggtcacagcgtatccagaactcaaactgtacgtctgccattgacctgacattgctcgcatatttgacag

SEQ ID NO: 840 - DNA, 91 bp, Sorghum bicolor
  source 1..91: mol_type = genomic DNA
tgtaagcattatctcgttcgctttcatgcatgctgccaaaatgccaacgcgctaacaattgccgacggatggatccaaaatgaatgtgcag

SEQ ID NO: 841 - DNA, 112 bp, Sorghum bicolor
  source 1..112: mol_type = genomic DNA
ggtaattgtggtcacttggcatcatattctctactgattccttttgtttttccagacagctttcataatttgattttcagtcaatattaagcattttttccatctcttatag

SEQ ID NO: 842 - DNA, 287 bp, Sorghum bicolor
  source 1..287: mol_type = genomic DNA
ggtaagtcatcaaataatcagcattttatttgtgtgcattcatcttactgctctggaatcttaatctagtgggaacaaattgaccaatggtgaaatgtcatgtttgcagaccaaaaataactaaaactaaatctaattcagtagaatcttctgcaaaagaacacctggaccatttgttttttatctttgctgcataaatgatatggggatagaaatggatagaaatatttttctttttgtttcattcagttgctcaatgcacattgggattttgttttggttgacag

SEQ ID NO: 843 - DNA, 85 bp, Sorghum bicolor
  source 1..85: mol_type = genomic DNA
ggtaaccccaagttttccagcggatattcggtatgcactaagtttatttgtgaagctctgacattaagttcttttccctgtgcag

SEQ ID NO: 844 - DNA, 106 bp, Sorghum bicolor
  source 1..106: mol_type = genomic DNA
gtgagcacacggatctctggggggcgcctctcagtgcgctgtgtgtgtgttttttttgtgagttatttgacattctattttcttgtggggccttttgctgggcagg

SEQ ID NO: 845 - DNA, 919 bp, Sorghum bicolor
  source 1..919: mol_type = genomic DNA
gtgatgtatctccctgctcgaatagagcttgatatgcttcatgtttcggccttgctgatgtgggggtggctagggtatccaatcgtgaccccccaaattgttttaggacaactaaatttgctgaattactaatcgactagtggggcttattttttggcatggcttataagtactagttattaattaggttggggtattctggacttgtgtcttgaactcgtgacccaacatttttttttgtttttacatgattgtttttggagtttcatgatctcaaacatgactcttaattagatggtcatgccatatgtactctaaactttgatgtcaaacattttgctatattggggatgtgtgtgcatggtggatttaatgatctatgtggaagttgataacaatagttaaactatataactgaatttggtagtccttttcataccagagctgaaatgatggaccccgatattttgtggtttctgcagcctatgtgtaaggtcactgcaaatcttggtgttgtataggatctgcactagagcttactagaaagttgaagtccggcctccaggtcaaatttggtgtgcattttaatttaaaaattcgaacaagctaagattgaatcaatagtgtagtgtatctgtgtgccagctacaaagtattcaataatggtacctggtgggcttttctggtgtgatgttttgcagatgctggcatcatagcagcacatgtttggatattgtctcatgcatcttctaagtaggctttggacatatgggagctgcaaaataatatatcttgtacttaatttttttgtcttccattgttcatgttctgagtgtgtctaatgcatttctctagtagttcttttgtacatttgaaattggttataattgtcttcacatctcttaatgctctctgcaga

SEQ ID NO: 846 - DNA, 1810 bp, Sorghum bicolor
  source 1..1810: mol_type = genomic DNA
gtaatatcgcaaattcaaagcatctttaactttggatgattcagatttcaattatgtttattccacatctggattttgtttgtgtagcaatggtctgaagctattgactttttccttcatttatttcgataaaagagccatcctttacctgtagattttgactctgttaatgtttaattcagtcctcttgtcagctttcactgctgtagatttctttgatgcaaaccagcacatgtcgaaggcttgcagggaaaacatatatgttcccttctgagctcaaaagttgtgcaatagaaagaaaaggtcaactagtgattgatgatctttaaggatacacaaggacatcacatgtgggtgacataaattctttatgcaaacaattttcaggaatgtttatattacaatacaaatatcaaaacttcaaaatgttatgggctttatgcaattaattaattaatctagtctcgtgaatgaaccatggtttgtgtcatactgttgtaatgttgtgctggttttatttgtgtatctttgccaatattttcaaaggcggcgcttagctccaccttggcgctaggtggagctgcatcgcctcacttggcacctaggtgttttgtctaggcttttttgtgcatagaaatgtttgggcttgacgtatgcttgaaaatggaacatattagagatggaggaagatgagctgcagtcatatcactcatggatgtatgataatttaagttttttagcaggattattctaatcacccacataaattacatacgcttagcattgcataggcactagacatagcccgatcgcctgtctagcatgtagcacttttgaaacactatttttttgcatatagctgtgccacaattctttcacctaatcatcgtttgcctttctacaaagatgtattattgcattccttgctcgcagatcagtctttctgcaggttcttaaagtaaacaattaccaatatttctttttcaacttggttgccatttgccaattaagtgtaaagatgaaagtaaatgtagtaagtggagtttctgataagaagctatttgagaaaacaatacttattgcatatagagattgaagatataaaatgacaatggaatcattttgaaaaagtacttacatattataaatagtttcataaatataacatagatagaatgccaaagttgcatctgaataacaagtggatgcctagaagtacactcttcccttaccaaatgagcacattatattatgaagcctcacacctaacaaaataaccaaaagatagtagtagtatacctgaagaaacagtgcataatgattacacctgctccacatcttctttttaaaatcttgttttctcaggtgccagtgactcccagggtatgcatcatagttatactcgtcaccattaactccgttagcacagcaaaggaacagggactagaagatttcttaagctatggttcatttacgggaatgtgactgcatgtttgtgctttaaaattgtttatacctgcatttatcttgtgattgttatttctttaatctttcaaagctcttactcatttttggcgatttgtttagtgtggcatagttgactactttgcaaaagacacacagcataacaagtcttttgattggctagctttaactaaagtagacattgcctacatttttggttgagttatggccatccagtgcttgttttacttcactaattagtatgtactcccactagacccttttatatagtggtgtgcaagcaaggctgatgttggagagtgtcatttgcttctattttaccaga

SEQ ID NO: 847 - DNA, 187 bp, Sorghum bicolor
  source 1..187: mol_type = genomic DNA
gtaggttattatacattgttttgccgtaaatcttctgtcaaacatacattcctctcttattgtgtgattgattttctacataaatgcatgattattgtgtccttgtctcttttcttgcttttattaggtccaaataaagtgatgaatctatacaaactagtcttttataaccacttctttctccagg

SEQ ID NO: 848 - DNA, 650 bp, Sorghum bicolor
  source 1..650: mol_type = genomic DNA
gttagttattgatttcatatgccagatgccttttgttcttgatgtgcacttttatattattcaaccttgtgagctatatgtcaaatgcatatttattagctagatagggtaagtaatatcattttggtttaaactttcgtggatttaacctatgttttctagttgaacacagcttcattcaagatgaaaatctgccttaggtatgaactgattgtgtggatgccaacctatgcaccactagtctggtacattctctgttgttatgttccctaataaaaaaagtgtcagctttgatgttctgttgaactttgaagtttcatttgatggttgctctttggataagtagccaaatattatggcaaatatggataggcttgagtagtcaaaactcaaatattatggtgaatatgggtagcaatagcacaactggaagtggaaagtatgttggttaagtaagaattgggttgctgaaactgattcttgatattgaaataagcatttatcgcacagctacatttcatcatggttacagctttgcatgttcaattggctctcttgggcagttgtgtatacagcttgtccatctttatgcataattaatctaaactcctgtgcttagactcatttagtcactatttcttgcctcaagg

SEQ ID NO: 849 - DNA, 78 bp, Sorghum bicolor
  source 1..78: mol_type = genomic DNA
gtaccctcattgctgctcctagtcaattcccatctcacttgcctggctattactaacttaaacaatgtttcctccagc

SEQ ID NO: 850 - DNA, 96 bp, Sorghum bicolor
  source 1..96: mol_type = genomic DNA
gtacgcgagcgcgttagctcatctgttgtagcgaagcaagaatattagcagcatgtaatgcaggcgctaagcgattcggtttgttccgtccgtagg

SEQ ID NO: 851 - DNA, 1447 bp, Sorghum bicolor
  source 1..1447: mol_type = genomic DNA
gtaagttaccaccacctacgccctctccctgttaacatttccgtgaccccgaaatggaaactttgttctattcattcagtgcaatattgtcgttcgaaaacgtaatctcgaatcgtagcgacgatgattattcctaggaacttcacatggtatgtggaatttataactacatgagcatgcttgcacagggattcgtgtatgcaaaacttttgagatctaatgctattaagaaatgaacaatttggcaaacggaatttaacctcagcattagcaggagcttgatatgtaattatgcgattgaaccagctcagatgctatattatacttctcatttttagcttatcagcgtgcacaccttgataacatgagaccaccagagatcattagcaaatatgcaaaaactcctctagttttgtgtttgaaagaaacatgatttgcccctatgattggccagacatctcatgacctctgggcatgtggcttctagtgtatttaagcattttctcaccagccaatcattgttctatttctaacactgaacacatcattgagcagcctgattgtttcattttcccatctttttttttcttgctgtattacatttgggataaccaattactggcttgatgatgatttcttgctttaaccacactgaatccggagaccggaggaggtgtattttcctctcttcctttgttgcttgtctctctcggtgtttccttgtgaaatctcttccttttggtgaagaactaacatggaatttattcttccctgagcactgctcttcaccaaagggttgagatggaaggatttggcgagattgaagagcaccgtggaaggggcaaggaagatcacatctgatggatcttctcatgtggaaaaagattggcctttaaactgagagcccttaagtcattttgatctttgctttgctgtaacatttagtatttgtcatctccttgtatgacttcagtgtagttttacctggagtttggttctttttattcagtctcgtggggtcagtactgactttactgtttatgcttctgtcttttgtacaaatctggtccctgttcacttgcccttttgcatgcaacctaagctaagctagagctgggatgttgcattatgcaaggtgttttgctcattcgccttttgttttctatgggtacatttctattacttggacctgttagaggtgtattgcggtgcactcatggtgtttgtttttgttcttaatgtgaaactgtgttcttttcttctgaggaaagtgattggcatgactgatgaatcaattagatgcacgaagtgaccttatgagctgaaaccctgaggcctattttttctctgatttgccaatttacctgcccattgccatgtcattgtatccggaaatcattttaggtcattgcctcattggcctgatgttctaccttttatctgcaga

SEQ ID NO: 852 - DNA, 129 bp, Sorghum bicolor
  source 1..129: mol_type = genomic DNA
gttagtgttactgcattgcaagtgttgtgcctgtatgtaggctagcacacgtcttctccgtcctgccatttgtgaagtgctgaagctcaactaagttaatgaaatatctattgcttttcttctttcagc

SEQ ID NO: 853 - DNA, 461 bp, Sorghum bicolor
  source 1..461: mol_type = genomic DNA
gtgaggtccttttccgttccaatttccgcactttctgtttatctcatccttccttaagaattcagtcgagttttgatctatctcagatgattctagctcagataattgtttcagatagggctgacttctgggttcttgtagcatagcctcaaaaaggttgtattttggagataatcctggaatattcataatcctgaggacaatcttgtgtatcacagcccgaagtaaaagctagagaaactttgctggatgctctttttttacgagttgatggcacccctgcgttcaaaaccacttgcttataaaaaagttaaaaaagggccatgatcggataaaaaaaacctgcatattaagaagctcaggttgtcaacaagcaggataagcatgtgacaccgatttttgtgtccaactcacctattttacagcatccaatttctcaaccttggctgtttgcttgcagt

SEQ ID NO: 854 - DNA, 445 bp, Sorghum bicolor
  source 1..445: mol_type = genomic DNA
gtgtgacatgttgtccctcaccctgagccatttcctggagaacagaaaatgtgttttgcaatttaaaatgcaatattgaattgagcacaaataattggggtttgaaagccctatcttgaactttggtgcattgcaaatgcgtaaagaacaaatttgtgtgtttgaatagtactagcaagtggcaggtagaactaatccacaacagtttggatattatacaggggtcaggatcttataatttaaacgttcaaccatcctatgccatgatttctgtagtattgtccatgacttcatatcatacaaaaaacatcactttctttacctggggcacttattttgaaaaaattacaatgctttggaactgttctctgctctttattaataactatcctgtttggggatggagtaatatccgaagttttacaatatgtttttctgctgcagt

SEQ ID NO: 855 - DNA, 990 bp, Sorghum bicolor
  source 1..990: mol_type = genomic DNA
gtatcaaaatgataatttgagaccatttatgtatgcatcatttggtcatcacaattactaagcccgctcgtttcagctggctgcggctgcactagcactgtctacagtagtttgcagttttgaggccacagccaaaagtagctgaagttccagtttctttgtgggcaattaattacagactaaattaccatctcaagaaaagaattgtagtattaagtgtgaaccattaaaaagaaatcacttcaatggtaaatctgaatcgtgatttggcaagattacagatacaaaaatatccatcttgtcatcagttttgatatacaacaaaaatctcaaattcaataaaatgataaattaaatatttgatagtaactttataagaaaagtatagataagtcctactttgagtttttttacttgaaaagctaatctaattatttcggacttttaccttatctttccaacaagtatgttgtttttgtcaagtttctggaagagctatgataaagcataaattttatggccattacagttgagctacctgtgtcagtgagaagaactccatttattcttgcaataagacatagcttgcatacagaaatatatccttcactgaccatccacctatcattcattgtagtaaaaataactctcaaaggatcttcatgagatttactatattaagtataagactcaaagcccggatattgtgcgagaccatctatgtctagacagtgaaaatgtgtgagtgaagaatattaatatcaatgtttatgcccacatagtggttaatagtacaatatctaaatctgtatgcttgagagttgagacaagagtgagtaaaaagagttaatatgcaaaattactattttcatatacctagctaaaggcataggcttgtcttctcaatcagataacaaaagcttgcaaaggaggtttacctgtcattgtaacttacaagaactctgtactgaaaccatttcctgttgcaga

SEQ ID NO: 856 - DNA, 108 bp, Sorghum bicolor
  source 1..108: mol_type = genomic DNA
gtatatgctcacaactcttaccaagttatattagattatagactgttttctagcgaaaatgtagctgcacgagacatgaacatctttctctgttgcctcatgcacagg

SEQ ID NO: 857 - DNA, 98 bp, Sorghum bicolor
  source 1..98: mol_type = genomic DNA
gtaagctctctcaccctcccccagccccctcctgctcccgctaaaccctaaacccctggagatctcacgcgcccaccgctcccttctgcctccgcaga

SEQ ID NO: 858 - DNA, 1022 bp, Sorghum bicolor
  source 1..1022: mol_type = genomic DNA
gtgagacaaatgcttatctgctgcttccaaactcgctctgttctggagtcctttccgaacttcttttctagagggtcacagtctggaaacttctaaggtgtctgtagctgttaggtgtgaaatgcgcttctaggaagcttgtactgcactggagttggcgcactcgttttgattgactgaagcattttaggttgctcactctagaaaagaaaatggttgctggcaccaaatgttaggttcaaacatgacagactaccacttcacttgggttgatgcaggtgtatcctgtgtttgttttacaattttaggtgggttcggctcaatttctgacttaaatgtattcattcatacttctttatcggctatcgggcaacaaagttggttcagctttatgtttgctgcaagccctgtggtgtagcccaaacggtgactagttgtcagtattgcgctattggctctctgttgggtatcgtgcaggtatcttcagtcaagtcatataacgaacactataagatttgaatgtgctgggagcttttgcgctactgttttttgttggcttgcctcctattggttgtagaggctaattttagatcccatggaagtgactgatagtctaaagcacatcttctgtaccagttcttaattaggaaatttttcttctcttatcctagtttcgaccatgtccatgttgtgacgctatcccctatagctaatggacctaattagttagtactgcattctgggagtaggattttagatacactactctgttgagaagaatgggaagacagcgaatatgaaaaactcacaaatgttaaggatttaccatgttgtattagcagcatcaataaagaaggtttcagagttgactatttaatatctaattcagcacagttgccatggtttataaatcctattgtgttgtgagctacctataacaaattcttactgtgccttttgacatgtttagtgttgtgagctacctataacaaattcttactgtgccttttgacatgtttagg

SEQ ID NO: 859 - DNA, 92 bp, Sorghum bicolor
  source 1..92: mol_type = genomic DNA
gttagtatttgcacatacatagaattaacactcataccataactttgttaactatgttttgttgatggtctttcacctactacccatgcagg

SEQ ID NO: 860 - DNA, 364 bp, Sorghum bicolor
  source 1..364: mol_type = genomic DNA
gtgaattttgttatctatttcatgtgtttctgagaagtttctgctctttaaattaaattgtgatcgtattctagggtattatttgaatctgaacattgttaattcttcactcttgctactttctgttcacctggcccagtgtgctggttgcatgtgttgattgtgaaatctcctgctatgtttgctaataagatacaatttgttatttttctggcttcatttaattgatggggatggtattatttctccataagccaatgctagctaaattaggattttcaatttctgacgtggttctgtaatatgtataagacacttatttctttgccttttactgtccacctgacttattccacatttcaga

SEQ ID NO: 861 - DNA, 475 bp, Sorghum bicolor
  source 1..475: mol_type = genomic DNA
gtatgtgcatgctttgtatttaatatgtttgtgttaccaaaactttgggtgatagagcagtactacttgtttcctatttgtgacagacagttttattaaccaggacctgattttctatttgctattatggatttgactgcaaatattgctatcgttatggttttgactgcaaatattactatcattatgccttttcacctctagcctaccccaaattgcttgggacttaaggctgttggtgtttttttttggaataatcatgttgatatatctgtcattcgcttatatcatggcagaaaggttttaacaacctaattttctctgggatatgatttgctaatggatttttggaatatggatttattatagtatatccaaaactatttttgtaatgaattgatatacagtctttcattaggactccagaaaggcttaatacattcatgtctgacaaagttttccatgttttcataga

SEQ ID NO: 862 - DNA, 72 bp, Sorghum bicolor
  source 1..72: mol_type = genomic DNA
gtatgcctctgtcatgattaattcctgttgcaatcattttattattttttgattgtcaattgtgctatcagg

SEQ ID NO: 863 - DNA, 700 bp, Sorghum bicolor
  source 1..700: mol_type = genomic DNA
gtgagcattttcttcatttcattccactaagcagataccttttctcgtatgaaacaatagctccctttgctcatgttagattggtgaattcatgaatgaatgcatcttcctttgctgtctgcttccattggttcttcctctttttttaatatagaatatacaaaactataactttgcatcattagttaggcacagttgcacaggtactattagtccatcatctactccatggaaataaaataatttaagaaactgaaagttgatgctctgtaacaacagattctataccgttctgtgcccttactatgattgtcatattggtttaacgtgctagttgatgattgagttgattggcgcttttgagcttttaggtgcagccattactgttattttataattttggactgtctcaattttttaagtctgccatgtgtttgggaccatttttcaccttagtagccacttagcccgtttaaatgctacatgttggccagccatgcttgtcaatttgcagtctagcccatttagccatctaaatgagaggtggccaactatttaacgtttttggttgagcattgtttgggacaaagctggtgtaacaatattatgattggttcagtttgtcttattcccgatggcctttgggacttcttcatgagaaacatagcgaatatgataatgtggccatttttggtgcagt

SEQ ID NO: 864 - DNA, 202 bp, Sorghum bicolor
  source 1..202: mol_type = genomic DNA
gtacgttatacttttcataggtgataggctgataactatctgtaagagaaaaatgtatgatgcaatactttacgtgtctagttatatttcttttgctttttgttcagtcaattgaaaatatgaacaaccaatgcttatctagtatttaacaacacttcaatcttaaattcttatctacacaaacatgatttgtgattgcagt

SEQ ID NO: 865 - DNA, 83 bp, Sorghum bicolor
  source 1..83: mol_type = genomic DNA
gtaagcttctctcttgcaattttgcctcttgtttaatactagtttttgctgccctgttcactcctgtttgtttactatccaga

SEQ ID NO: 866 - DNA, 881 bp, Sorghum bicolor
  source 1..881: mol_type = genomic DNA
gtgctatttctttgtaaaattatgtttgatattaaatcatttctgtctgctttctttcaaccaagggaaaactcaacataccactgaattgtacccctttattaatacataatatattgctatgtcacatgtaagctgatctaccaatatgcttgaaatactttagcaagactttaggggcttgtactttgtgtttgttttttaatggtgtgttttaaggccctgctgggcttgtattgtattttgctcttaatataatgatgggcaggtctcctgctggttcgagaaaaaaaaggaagactttatgggcttgttttcatagttagagatgcaaccaatgcaaaaatgagatagccggaaacaaacacaagctctttattttttgacttcattagcagctcaaattaggtgttattccaattatgagtcagaaatatcagctttggattcattcaattcaatctggaacttgtttcatacctggtagccagtaaccactatgtcagcaaatccaagtaaaaacaatagtttgaagttctggatacagaccccccccccctcctcctctctgatgtatcgcttaaagttgtttggagtttgtgtgattattttagtttctgttctttgcaattgggggcaatcacaaattctgtgatggttttcttactacttgtcccattctgaaggttttaatatgttattcgtgcttatgtataatgtcttgttcatttgactgctgtatttgcttatctttacccctatactacaaaaatgtttgcactatgcctctttgcaatacagagcgctgtcctgtaatggttttgattacagccagacaacatgtactttttatgtgagtttatgtttgtccttgtttcaga

SEQ ID NO: 867 - DNA, 79 bp, Sorghum bicolor
  source 1..79: mol_type = genomic DNA
gtatgttcttttagttttttctgtatgcagttgaaacttttttttttatggtttcaataatgatccgttgtattacaga

SEQ ID NO: 868 - DNA, 216 bp, Sorghum bicolor
  source 1..216: mol_type = genomic DNA
gtatacaattgttgtaactgtaatacttatttagcagttatctttggtgttatttctattgtaaattcaatattcctttggtttcttttatgtgtaccttgaatgcaacataaattatatttctttcattcacttatgggttttaaacctttttctttcattacatttcctgttatgttatagcacttaatttcccagctttatttttcatgcaga

SEQ ID NO: 869 - DNA, 460 bp, Sorghum bicolor
  source 1..460: mol_type = genomic DNA
gtaagttagactttagctatgagtacctatttgcttgttatttaatccatccatgtcaagaatatgtgttactttaccttgtagggcttattcaccgttcctaaatatcggtgcatctgtgctcccttatctgtctggcataaaaatggagcatgactgcatgaggaactctgacttaataattttgataaaaacctagtttatcatgctacaaaacaaatttaactcaacatctgatgaattggggtttgagactggggatcaatatgacaagttactgtttacagaagttggatttttttaataacaaattacatgtgttttttgaggtgggatttacagatgcattgagagggtggatgcatcccatcttttccactgctcttgtataatcttctgtttcttttttctttggcatgttctgtttatgggattcttaactatctgatatttgagcaga

SEQ ID NO: 870 - DNA, 259 bp, Sorghum bicolor
  source 1..259: mol_type = genomic DNA
gtgagtagcgaggaaaggggtctgtagtacttactggtttgaattaggttgtaatcacctaacttgttctagtgctgtgttttttactgcactggtttttgtaatggatccatgttattgtgcagaaaaaaccctagtgcattgctttcttgtttagtgtatgttaacagtggtttagataattgtttgaactcagcagacttgctttctttcaccttatatcccggccttcattctcacaaattttctgaccaacaga

SEQ ID NO: 871 - DNA, 95 bp, Sorghum bicolor
  source 1..95: mol_type = genomic DNA
gtaagttgaatgaagcctgtactgttctgcattgcaggcagcatggcaatttggcatatatagctaaagttgctggtactttgtttctacccagg

SEQ ID NO: 872 - DNA, 137 bp, Sorghum bicolor
  source 1..137: mol_type = genomic DNA
gtaaggacatgaattccagagcattttactactttacatgtatcatgcatggcagcatgtgcatgcgacattagtcccttcagcagcatcctttttctatgctattctaacatctgcaaacttttattctgtatagc

SEQ ID NO: 873 - DNA, 358 bp, Sorghum bicolor
  source 1..358: mol_type = genomic DNA
gtacaaacttttttagctctttaaccacaagtacatacttgtaatatctaggtttgtattaaactgaaactatatgaggtgctttaaaattttcatttcagtataatttgatttccaactatggaactactacaaaagtaatggttaatagagtatacagactatcggtagcttggtacctacaattggatatggtgggagtgtcatattagttcacatatatttcccctattttgtgaccttattaattgataattatgaaacaattctctttgttcatgttggttagaaagggtgaacccacgatttttactcattttttatgctggttattatttccacattgaattattacagg

SEQ ID NO: 874 - DNA, 196 bp, Sorghum bicolor
  source 1..196: mol_type = genomic DNA
gttagactattatattacctgttactccatgctttccaaattataagacattttggcttttgtagatacatagcttttgctatgcaatgtatctagaaaaagccaaaacgtcttataatttggtatggagggagtaggtaataacctactgctacttacaaatgacatggctgatttgttggaattcatatgcagt

SEQ ID NO: 875 - DNA, 83 bp, Sorghum bicolor
  source 1..83: mol_type = genomic DNA
gtaagcttgatattctataggccctcagttttctatacttgccctggacacctgataagtcgcgccatgtatctcgtgccagg

SEQ ID NO: 876 - DNA, 112 bp, Sorghum bicolor
  source 1..112: mol_type = genomic DNA
ggttggttcgccatctttactctttcttttttcttccctttctacgctagagatctgcgatgcccttggatctggtctcgactcactccatttctgatgccatgggcggcag

SEQ ID NO: 877 - DNA, 104 bp, Sorghum bicolor
  source 1..104: mol_type = genomic DNA
gtacgacgacgcaatgcaatttgctgactagtctcaggcccttttctttatgcatgtacactagctagtcagggtttaagcaaagcaatgaaatttggttcagg

SEQ ID NO: 878 - DNA, 1041 bp, Sorghum bicolor
  source 1..1041: mol_type = genomic DNA
gtgcgtgctccccatccttgttcttgttgctaccggcgagttgttttgacctatctatatgcgacgagtcgatggtccgatcgatccaagtttaccctagctgttgtgatgttcatccgatgttacttggattgatccggtcagattaatgtggaagtttagttttgggaatatattattgatgaggtagtttggattgctaggctgagcagatatagcatatccggaaggttgtgtttttgactgcttaagtaaacgtattcagtactatgtgtaattttgttgttttaaatacaattgcgcctacaactgaagcacactagagttccaacaattatgctagtttccgagttgcaacaattatgctagtctcctttaaaagtaggttcattcaatagaaattgatgcagcttgatataatataaaaaaaaatctgttccttgtactcacagcaatacttattaaatccattatgatgcaaagaagaatatattctcttgtttttattgctatatatttatggactttttaagttaatcttctaaaagatgcttccactaatttcatgcatatatgtgcatgatgctagatatagtggacatcttgagatgcagcctattatagggttcaatgttaaaaaaacaattaagggcaagtgtatgtgtcttgttaggcatcctttattttattcccctagaaattctcactctgccgttttgctctcctcaagttatgtatatgtgtcttgttaggcatcctttattttattcccctggaaattctctctgcggttttgctctcttcaagttatctctgttttttttcggtagtctatgtatagtgcattcttataatttcctatttgaaaagtttatatgcaaccttgcactatgacaaattggtcattggtttgtaaacttttcctaccacgaccttaatcatgctttggagatgtcaccgttatgttctgtgagttagtggtcactacatcttcaatttgatactaaagagttgacatgttattttgttcactgtcacagg

SEQ ID NO: 879 - DNA, 129 bp, Sorghum bicolor
  source 1..129: mol_type = genomic DNA
gtaccctgcagattttagttatatctgcaactgctaatatttgttcttcaaaatgcttattctacttgaaaccaattatgctttcctgacgtctgatgctgatgaagtgatttctgtcgcctttgcagg

SEQ ID NO: 880 - DNA, 138 bp, Sorghum bicolor
  source 1..138: mol_type = genomic DNA
agtacgtatatatatatatctacgccagccgatcgagctagctatttcctttattagtttttcgttcgatgcaagaactgatgatccaagctctgcgcatacgatccctaactttgatccgtccgtcttgtcctgcag

SEQ ID NO: 881 - DNA, 488 bp, Sorghum bicolor
  source 1..488: mol_type = genomic DNA
ggtgagaatcagatcatctgttttacttgttcatacacatccaataattttatttgttatataccactccgatcgttatagactatcatctttcatgctcattgttggttgatgttaatgttgtccatgttttgttcagtctcatatacaatattttgtttcaaaataattactgtcaaggttgttgcatttgcatcgctgctgcgagaaatcatgctttcagatttactcgtgggaataattggtcacatttccgggtcattcaagtgtacttttgctctttcgtccgtataattaggcaacattgttgttgcatgtgtttaggtgatcgcattttttatttggcttttccagtcatcgtatattatgtatagaaagataaacttttaattgagatccgcacgctagatctgcagttatatacttcaattgctgtcagcacgtttggtcattctttgatctaatttgtgccctcctgattttttcag

SEQ ID NO: 882 - DNA, 182 bp, Sorghum bicolor
  source 1..182: mol_type = genomic DNA
gtgatacatctttatatgcattgcatgcctcctcgatccgtctcttgtttcaacctttttcttctttatacatttacattagggttataatttagatagatagactaactaccctaccaattaccctaccaatttgtccggacattgttgactgccttgctgcttgttaatctgcgtgcagg

SEQ ID NO: 883 - DNA, 500 bp, Sorghum bicolor
  source 1..500: mol_type = genomic DNA
gtacgtgtaacccctgctgatatccttattatatcgtctgctcatctgtttaaacgtctgacccttatcgtctaatgctcatctgtttaacctgctaattagctctgacacgcattcacgcaatgtgaagataataatgccgctcaatgcatgagacgaactgatggttggctatgtgctagattattttgtttcatacatatattccaatcggacacagattgaaaatgtgaaatatatttttagcttgattacttgatcgatatacattttcataattttagattttcattcgattgtgtacgtctctacaactcattattctaggtttattgttaaatgattcggcctagctacaatgaaacatttagtttgtggaattgtcgtctttagcagcagctaaatgcaaattttagctattcatctatctgcaaagtttagctaagaagtagaatcgatgcttaagttttcatttttctgtgtctttgatgattttcagg

SEQ ID NO: 884 - DNA, 591 bp, Sorghum bicolor
  source 1..591: mol_type = genomic DNA
gtgagacttcttttttaattaatttctgccacaggcgtcatcatcaaattatcattgaaataacaggaacactcatagtattttgttgattcattagcgtcttctataagttcttacccaaattaaaaaggggttttctcatcggtcatttccacggcactcgagtttcctgctagttcgtattgtggtcctttcggttatactatctctcccccaaagtaaatcaacttatagaatcaccttaaatcaaattaatatcttatgctgaccaatatggaaaagcgtaacatcatttatgccaccaaataaatgatattataaaaatataatctatgtatatctagaagttgatttattttaggatatatagtaatacttcagcatcaataaaatttcctagtcgaagttttcatttcatactatgctaatactgtaatacatactatctgttgtgctaaatcataattcgattttacaacagttgtgtataggcaactgttttaagtaactagcagccgacaacatttaattatgatgaatcagtcctttgatctgatctgatagtttccgaacattgctcttcttttcagc

SEQ ID NO: 885 - DNA, 665 bp, Sorghum bicolor
  source 1..665: mol_type = genomic DNA
gtaaacttagcagcagccgccgccctgctcctctcctatccgcggttccaaagtcgaaagcttgctcctttcggcgtccgctgctccaaagttgaaagcttgctcctttctgtggtttcgatgtgttcttgtagccatttacttgatcatcgatgtgcatgtcagcatgtggttgggttgatcgcggcctccactctccctatttctctgcaacctcccccgtttaatgcttgaaagtttggtcttttttcatgtgtttattattattgttacttgctgtccttgcacgcgttggaactttacatgttctgggtttattgattgtggttgatcgcgtcgtccatatcgccgtgttcgatcctgatggttttgggttagaacagagcactttgatgcttcaatatggttattagatagattaaacccaaaaaaacaaaactttcttcttgatccggtcaagcacagggcttggttgcgcttttgcgttcttactttactgatctttgtgcttcttggggttaatagtcgggggtggcttgatcggattcttggcaactccacagcttatttgaactgatcagatccctgtttcccaactcggattttaatctttgtagcgaactaaccggccatggaaactgttgtttaaccaatttatttgcagg

SEQ ID NO: 886 - DNA, 558 bp, Sorghum bicolor
  source 1..558: mol_type = genomic DNA
gtacgtatcgaggccttaattctgctaactctactgatctcttctgtaaatgttataatttggtacagtatgtgtggtggctgcgttgtcttgttagatcgaggtaactgaacgtctgaacccaagagttcgctctctgttttcatgtactccggcctctgtgttcactgcatgcaaatggagtacatgtaatgagattgatgcaatgatacgtatgatatgataagcgcaaaatggagctgagtacatgccctttgattctggcttgtttatttcagttagatagttgatctcattatgcaaccgtgccttgtttgtatagttattgtcaaatctagtgatgaatcttaagatatgcacagctgcctctagttaaacacagcaaatttatctattcactgtcttattataacttatacatgcttcttcagtttaataagttttgtgctgtttactcctgtgttattatggctatgttttcattagcacttgaggatttgtgcctcttcagcttctttctttattagctttaaactgtgcctgtaatgtcttcgcagg

SEQ ID NO: 887 - DNA, 397 bp, Sorghum bicolor
  source 1..397: mol_type = genomic DNA
gtaattaagccttgttttcccctgccatccaagtgttttacaagtaggccaacattattaatgttcttagatttactcttctaccttaatataatgatgcacaaatctcttgcttactcgagaaaaaaaatgttcttggttttgttgcatcgcccatgttatgatgctggattgctggtgtaagagtggatataaaatggcatcaccttgttcaagttatatcagtagcattttaccagttcagatgttaatggattttactatccaagctcatctattttcatgtaatgcttattctagttttttaattagtgtacataaatctactcttttgaaccatgacctgtttgatattttttgttcattctttgattcccccctaatattacttttcagc

SEQ ID NO: 888 - DNA, 862 bp, Sorghum bicolor
  source 1..862: mol_type = genomic DNA
ggtaagtcctcacctccctgacccaccccatctccgctcaattcctagatccgccgcccgttcatgctccggatcacgaccgagtttctcgcgtactgccccagacacaatccgccgctgcttcggccactgattggggggaagccggttcgagagtcgatcgccggtgccggggcgggcgggaccggagtgcctggcacggctggacggaggctgggagccatgaaggactgaaaaaagcgagacacggttgtttgttggggcatcggtcgcggtagttaggcagcttaggggcgttagggcctgtttgcttggctgaaaagccatgactcaaagtactgttcgctgccgcaatcgtgaattgctattcacaaataatggcgtgctcggttgttttgacattgttcacaagacaaagcttaggttaaccccaagtacctgcaaactatattcaaaattgctggtgaaatctctagttgttgtgttgacagtgtgtttgtgttaagttcctttgtcttcattttttgttattttaaaaagcatatattgtttcatgcatttcagacctgttgtctgtacaactatgtaattgctagatatattgatgcacagaagaaaatgtcgattgagcctgagatttctagtacaagctaaattcccattatcctatattgccatgtacatgtgacatcctgctgaaattctggtggagctcaatctgttctcagttttcgccagtgccaaataatcatatgggaagatgcgaggcttgttgagtctccgataataatgatgaaatgacactgagccagattacaaagtggatcattcctttctctaatttgacaccttttgattgcag

SEQ ID NO: 889 - DNA, 83 bp, Sorghum bicolor
  source 1..83: mol_type = genomic DNA
ggtccgaatctattttcttatcatctttctggaacttcatgttcatgagtacatcctatgataggcgcttgtgttcgttacag

SEQ ID NO: 890 - DNA, 143 bp, Sorghum bicolor
  source 1..143: mol_type = genomic DNA
ggtatatctatactggtatgcttaaccctgcgtgtaatgccttaccctttctctggaaagtattttcccctgatatcctttattatatttcctaagtttcctagttctagttaaagcgacacctttctattttcttcatttag

SEQ ID NO: 891 - DNA, 90 bp, Sorghum bicolor
  source 1..90: mol_type = genomic DNA
ggtatggcatttccttttatcaacttgtcacatactgccagagctgtagtttctaacatcaatgcctaacaaattgaatcccatgaacag

SEQ ID NO: 892 - DNA, 100 bp, Sorghum bicolor
  source 1..100: mol_type = genomic DNA
ggtcatctctccctcctgaccatgtgctccagtctggggctctgggcattcacacaggcacatacaatatcacattaacactccactttacatgtttcag

SEQ ID NO: 893 - DNA, 1335 bp, Sorghum bicolor
  source 1..1335: mol_type = genomic DNA
ggtatgagaataatgttcttccctatatccgaccaagtattttggtttgaaggggtacattcaatttctaatcatctttgtgcaaccaactcaaatatcatggtaatcagcaacatattaagcccagaacaccataagatggcattttaattagtatgccagtcaatgatttcagtatgttgtatgaaagtgtttagaaattaggcaactacaaatttataaaaattagaaatcaattacatatgaatagtagtaaaaagatataacaactatggggggtccccaacaggatcctcactcatacggggaccagatatgagtgaggcgattacatatacaccagggttaaacacatagtgaacaaacacaactcgaccttaactaaaaggacctagtctgcgagtgccaaatcaagtccttgaagcctcttcgcccccgccatacaccagaggctgtgctcattcttcaactcactccagatcatgctaatcaaaggagaagccccctcaaaaacacatgcattcctatgtctccaaataacccaggcccctaaaataattaaagacttcactcctttactgtgctccttggaaactctgcttattgtcttgcgccaccagtcagcaaaactcaattcattttgttgtgggactaaattcaataggttcagaggagtgaataatttgaatcatatttgtcctgtcaccacacatgatgttaacaaatggtatattgtctcaacttcttgatcacaaaggggtcatttatcaggatgagagaggcccctcttggagagccgatctgccgtccaacatctattatggattgccaaccacaagaacattttgcatttgctcggggcccaagtcttccatagacgatgccaaggctcaaaggtcacagcaccacaggaaaaaggctttataagcagatttggaagagtagcaaccacttgcatctagtctccatatatggcgatcctcttgatcagtcaaagaaaatcccatgaggcagtcccatagctgtaggaattccctaatgctagtccaggataggcctccttgtcagatgctcttttcagcatgcctgtttgatattctttatgttatttgcttttattttctttttctacaactatgtgatttcggtcatgttacaaaacctgtttccatttaggatgttaagtttggaccaatgagcaatcgtctttatccctgtgcttacatgtgactcatttaacaatactgtgatgtgattgtgaagcttttatttttaactaaattacttccactttcaatcttaattttgcacctatcatctttttcatgcattcag

SEQ ID NO: 894 - DNA, 87 bp, Sorghum bicolor
  source 1..87: mol_type = genomic DNA
ggtaagacctatcttgctctgaagattgtcttctgcagctgctgctacatgatttttctgattcaattagttctcccactttaaaag

SEQ ID NO: 895 - DNA, 80 bp, Sorghum bicolor
  source 1..80: mol_type = genomic DNA
ggtaacttgtcttattgttcttaattattgtctctatcttgctgttgtatatgtagtcatgacagttaaattatgtacag

SEQ ID NO: 896 - DNA, 72 bp, Sorghum bicolor
  source 1..72: mol_type = genomic DNA
tgtaagtatgttgccctgcttgtaatttttccctgttccttttcttattgtaagctcagttcttgtgatcag

SEQ ID NO: 897 - DNA, 108 bp, Sorghum bicolor
  source 1..108: mol_type = genomic DNA
tgtaagactattccatttctgttcctgtttagtattattgattgcagtatgcaattgtgtcgacaaactctgcaataagctagtattcaccaaatattgatttaacag

SEQ ID NO: 898 - DNA, 385 bp, Sorghum bicolor
  source 1..385: mol_type = genomic DNA
ggtatacatatattaccagtacagtacattgctggttcaacctttcaattgttcaaatgaaacatggattagaaggaacaatgggttaatatttttctaatttagttcttatgatttagggcactggtggattcaaattttatgcttgaccatggttgtatataaacagtatagtgcttaagtttatttagaatattgaatttatttaaatttatttgatgttgatgttctggacttaagttagattcaattataaagagtctgagactatattgaaatatcaactacgtaagattagatttcctatgctttacattgtatagttttttaataggttcatcatgtccttttttttcttattataatatatgaccatgtttcgcag

SEQ ID NO: 899 - DNA, 369 bp, Sorghum bicolor
  source 1..369: mol_type = genomic DNA
ggtaagactctaattccttttgaagtctgtagtcatgaggatatgctcgtcttaatttatgtttttttagtttactgccagcacggaaaaattatgtgtgtgaaacaacattatgcgtaccaattgtttttattttggttcgagccctgcatcctcttaattaaaaaacggggttgtggtctgctccttcccgtcaagttatttttttattgtttttattttgatagccttcttggtagttgtcatgtaagcacatatggatattgttatgataattgcctgtaatgtttcttatagcgattattttcctggttaatataagcctctacccgagttgcatatgcttaacaagttactacattttgcaag

SEQ ID NO: 900 - DNA, 321 bp, Sorghum bicolor
  source 1..321: mol_type = genomic DNA
ggtaatatacatgcaattatattttttatgtcctgaaggaaattgttgatcgctagccgagttgtaagattgttgatgttctaccttgcattgctgtaatcattggtccgcagttgttattcttgtctgttgacctctacaacaaattctgttaaataatttgcgcttcctttcttacaaataggagacataagtgcataaaattattgaactcagacagaacaatccaaatacactttctgtaaaggatatgcattcatctcagtattagcatctgctctctgtttccatctgtgacacattcgctctcattgtgcatag

SEQ ID NO: 901 - DNA, 92 bp, Sorghum bicolor
  source 1..92: mol_type = genomic DNA
ggtaattcttgtatatgtgctctcatgcagaatcttattacactgatggattgctagtaatatacttcctgcgtattgtttggaccatgcag

SEQ ID NO: 902 - DNA, 97 bp, Sorghum bicolor
  source 1..97: mol_type = genomic DNA
gtacgagctcctgccgcgccgggcactccccaaaccctaaccctagcgctagcgggccttccagtattctgtaacgtggcggttgcctccgtgcagg

SEQ ID NO: 903 - DNA, 687 bp, Sorghum bicolor
  source 1..687: mol_type = genomic DNA
gtacgccgccttacgctatggagaatgctaattggtgttgatttggtggttgaaagctgcgtcaaagtgtagattttctgttctcgtgtttgcttagttgctccttgctgttcggtttcagaagttgagtgtgcagtttccggctggcaggaattttactttactcttataagaatcgttattattgtgggcgattcatttgcgtttactcttttctttgttgtttatgtgacctgtgcgacagtatattgatcatttgggacggttatagagttcgattccaataccactcaagctgttttccatttgtttgtgtgatttcactcttgtctacatgaactaattctgttggaattggatacaaattgaaattttagttgtctgcatgtctgcatagacttgataggattgtgttttatgatcccatgttactttggtccgtttcatgtacttgtgctacaagtaatcctgcaaaatgttctaaagcccatatagtactgttatcattgtgtttgctgagtgctctgtaagcttcatattgttttgaatcatcattacatgaaaggaacagaaatttacttatttgaagctgtcaactctcatgtctgtttcaatcaacggacttgcaagaggattaacgaaagtttcattattcaactcattgtaatttgatttccatggtacagg

SEQ ID NO: 904 - DNA, 706 bp, Sorghum bicolor
  source 1..706: mol_type = genomic DNA
gtttgttctcagacaccatccaccactttttagttctcagtagatatatagatggttctttgttattcatatttaattttaaagatagataaaccagtaatcaatctgttctctagaatacattaaaacaactacattcttgataaatcacattagaagttttaattagggcaaaatcgctaaagtactacatgtgttaaatgatattttttatgtccataatctgtcgttcaaacatgatggtaaaaaatattgtcaaagcaaaatagtgaaatactctcataaactgttttatattgagggcctgtttggttccccttgctaaattttagccagctaaactttagtcactttagtagctaaccttccaaacacactgactaaaaaggagctaaaatagtttagtcccactagtcacccaagagtagctaaaataattttagctagctaaaatttagcaaggggaaccaaacaggctctgagtaattgctccattattagccgagtgatcatctgtctcatgattcagatggtcccctataattgcagtaagtgccaattgcaatcttatggcccaaagagataaagaaaacatgtgacttcttaattttctggatcatggtgtttacactctagggcatattccttttgcccttgatattgttcttttttcttgtctgatacaatattatttatctattgcaga

SEQ ID NO: 905 - DNA, 702 bp, Sorghum bicolor
  source 1..702: mol_type = genomic DNA
gtaaatttgctttgtgtcctggtttctttccaaaataatttatatttcttcttctgttgttattggactattattatcttttcttttatttgttaatttgctgtccattgtatttgagacataagaaaaatgctggtttagctagtcttgttgaatcacaggagcgtggtttatgtatgatggaataaactatcagttcagtgtgtgtaattaatctgataatactgggttctctccagatgcagatcttagagattcttatattgtatagcattcagtagaattttccaagtcagtagagtgtcctaatatttccaagaggaactcaagctgcagcctttcataaaggcgaggcaaatgaccataaatgagtggtattgagctactctactttaaatacaaaatgtgcatgggttttcaagttaactctgttggtaagtttgttctccttgccagtccatgataccaaaacataaacaaggaagagttggcttcctaaatcagcacttccatgttcccatagtgtaatcactgcacattgcttcaattatgttagtccacatcagacatgcagacacttattaagacggctatattgtctgtccgtatatatcctctaccagaaatttgtgccttctctttcttcaactaaactgttattcggctgagtgttgttgaaagctaacaatgatgctcaacagg

SEQ ID NO: 906 - DNA, 111 bp, Sorghum bicolor
  source 1..111: mol_type = genomic DNA
gtaatattttctgtgatcttgatgttatgagctgcatctagttatatgttattagttactttatcataaggtttgcaatgctgatgctgctgcttttatctgaaatgtagc

SEQ ID NO: 907 - DNA, 654 bp, Sorghum bicolor
  source 1..654: mol_type = genomic DNA
gtaagttcttgtccccaagatacacctctctccaactttcaccagatataacaagaatgtttgcctgattttgtcttccctccagtaaaataaatgcagtgcatatgtgttttaaatatttcaattcatgtttaataatatttaacgactagaattgtatctattgataattctgtggtaaaaagaaatgaaactaccactgctgaagactactttcgcatgcagctgcagagtttttttattgatatcccaaggtgctgttattattcacatttttaagggaaattgtccactgatactcctagctgaacaactttagtcaagcttgccttaatctagtgtgatattgcaggtagtttttggaaaaatattatttcagtttctgctggggttcgacatacggaatttatcatgttaaatccatccttgagtgtatgaaccacaatatggattttgctccttttttttatgtgtaaactgggttttgctccttggtcatggtccctgtagtatagtcaataatgaaaagaaaactctactagaatcattaaagtatttctgtgaaataaaatttctgcttttttctcacatgtgtatttcaaattaaattattgttttctgaactaaagtccttgtttgatctgttttttcagt

SEQ ID NO: 908 - DNA, 84 bp, Sorghum bicolor
  source 1..84: mol_type = genomic DNA
gtaggtgatagaagtatatttctgaagtacttcatagtgtttatttttcctaccatgtaacagtaccattttacattgaacagg

SEQ ID NO: 909 - DNA, 234 bp, Sorghum bicolor
  source 1..234: mol_type = genomic DNA
gtaagaaacttatatatatattttttgttcttatataaagctttgaattttgtattcttgttttgaatgaacttgtatagagtgcatagggctttctataggatttgacaaatcgttgtgcttgtacttccttgagatggtgattcttttcttccaaaaggatatttagttatatgttttctctgttactgaacattcttgtaacaccatggattgatcacttcatgttgcaga

SEQ ID NO: 910 - DNA, 155 bp, Sorghum bicolor
  source 1..155: mol_type = genomic DNA
gtctgtttttgttcagttattatctacagaattctattcatgtgcttctaacatctagatattgtgtgtatacacatattctcttaaatctacacctttacataccccggaatctctgaccattgttgcattccaattttgtgtattttaccagt

SEQ ID NO: 911 - DNA, 483 bp, Sorghum bicolor
  source 1..483: mol_type = genomic DNA
gtaagttgtgatgtaaccagtttgaaatttatcttttatgctttcttatatccaatgataagatactcctattattccatgtcgtgttaattttcagtattagttatttcaaagccactttcagcaagttccttctttagatactatgaccccttgcggatcaatgtccaaatataggacaaaactacattgtgtattttgccataccaaatagtgatcaccctttataaattgtatttccaagcatgtttttgatcttgcataagataaggtcctgtgtttttttaagagcaaaggaccgagccctgttgctgcattgaacaggaaaagaaaatgtggttgtgcctatgtattacgtctctagaattctgtatgagtcatctacctcatgtttagataaatgacctcaaatcttttttaaaatatttgccagacgttctattatatagtactcttgtaatttgtttcattcaactatatagg

SEQ ID NO: 912 - DNA, 117 bp, Sorghum bicolor
  source 1..117: mol_type = genomic DNA
gtaaaatccccgcttcaagatttccttctggcggtggcaattctatcctatcttagtttcatttcagatatcaacagttcggctataatcatatcatttgatgtttcattgtgcagg

SEQ ID NO: 913 - DNA, 644 bp, Sorghum bicolor
  source 1..644: mol_type = genomic DNA
gtacttgagctttattgttgataaagctgattgtttatagttgttagattagatctgttaagagtgagatgtacatgttcaaatatctcctgctttttaccatgcttgtgattttttttttcagtatgatgcaatacattatatccatctgactgatgctatccatgggacctagaaccgcaatatcttgttattattataaagttgctattgctcttgaaagtcatttcgcttgttttagttcatgtactgtatttctatatcatcttaaatgacattgatacttggttattgctgatgtgcttagtaatttcacatttcagtatctagacactgatacttgtggttattgctggtgtgcttagtaatttcacatttcagtgtctatcttgtgtgctgttgacatgttttgacacaggatcagaaacaaaaagttatattcttcaatttatatggaagtgtagaatcttgcacttgttgcttgaacaattgacattctgactgtgattactatcacctctgtgtgtcatgtatcttggttgccatgtgtactttattaactgttgttttttcaattgcctgtgcaattaaacttgattaccatgctacattaaatattaactcaatctatttgtttgttcagg

SEQ ID NO: 914 - DNA, 119 bp, Sorghum bicolor
  source 1..119: mol_type = genomic DNA
gtaagcaacctcattctttctcagttttatccttcaggttgcagatatatcatatatgcttgcttgtactggtgtatttacagatatgataacacactatatttgttaatttctgcagt

SEQ ID NO: 915 - DNA, 123 bp, Sorghum bicolor
  source 1..123: mol_type = genomic DNA
gttggttctcttgtctggctgtcaattttttagctaccactaccatacatttgtttcagtttccttttgcctgtttattcatttctgatttaataaactgatgggatcttgatgccaaacagg

SEQ ID NO: 916 - DNA, 77 bp, Sorghum bicolor
  source 1..77: mol_type = genomic DNA
gtatgttactgcattaaacctatttcatgtcagcattgagatagcagtgtagtgagtgacaacaatatttctgcagg

SEQ ID NO: 917 - DNA, 96 bp, Sorghum bicolor
  source 1..96: mol_type = genomic DNA
gttgttactgtctcaaaatctaaatgcgaagtttctgcttgctttgcagttctattgtataggaaatttgatttattgttgttattgttttgtaga

SEQ ID NO: 918 - DNA, 846 bp, Sorghum bicolor
  source 1..846: mol_type = genomic DNA
gtactgtctcgtcgtcgtcctcgtagatctgttccttctgttagaaatgctggaaaattggtcgcgattttggggttcgtcatcgtccggatctagtccattttctatagttagaatgacatgttacgatgtcgtggttctcggctcgcagatctagccgatttgttgccatgtttggaaacctatgtagatctgtgcgttttcctcgacattttcgagtatgcataatatttatgcggttacttggattaaatacttggttcggtttcccgtagtaattgtttatgcggttcaaagtatggagatccagtgactctgtaattgcccgactagttctggtagcagcagcaagtttgttcaattgcagcgttcatagcatttaatttggcatctctgccggcatggatagactttatttgtatgatgcttcgccacaaattttgcctgcctgttttggtccttggctatttcgtactactagtaactgtgaagaatttattgagccatttaacttgtgagagatgaacttatataactgattattttctttactgagatgagcttatataactgatgatttaacttgtgagagatgagcttttataactgatgcgttcatggccacaaccttacaactcatcttggctattggttactggaggatatttgcttatggttcatgttagggtgtttgctgggtttgtccatcttgatgtcatcttattatctacaaagtaactagaatctcggttattggatatttcgttgaaacaaaagtgctatatgttcgatttatgcttcacctgtgaaattgtatctgaaatatttaccttttttttctgcagg

SEQ ID NO: 919 - DNA, 424 bp, Sorghum bicolor
  source 1..424: mol_type = genomic DNA
gtaagtttgcattgcaactttgttcagtcactgcacctacaactttagtatttattgatcattgatttcatatcgtgatgcaaaagagtggattgtagtagtagtcatcttcgtgtggaatcctgtgacacacatctatctcttggatgtcctgtgatgctgcaatgaattaccatgtccttgtctgcaattgctgcatatttattgcaatcatgcgctacttgattgaattaatgtgtatgtcgggcacatgcatctcactagcattttgacaccgtacggtctgttctggagtttgctttgtactacagaatacattgtaatgccctgagatgatcgtttcatgattctctgccctgttccttgcatttgtttctgccatttagatatgaatctgaatcatgcttttttatgttgttccagt

SEQ ID NO: 920 - DNA, 99 bp, Sorghum bicolor
  source 1..99: mol_type = genomic DNA
gtacgccctccctccctcccgctcctctccctagatctgcgcgcgcaggcgcgacggcggtgagtcacgctgctgatctgctccgactctcgcggcagg

SEQ ID NO: 921 - DNA, 103 bp, Sorghum bicolor
  source 1..103: mol_type = genomic DNA
gtgggcgctccagctgtgtactgccgtgtccagttgctgctgttttttttttcgcgaccttacttacggttgattgatttgggctgaaatgaactctttcagg

SEQ ID NO: 922 - DNA, 202 bp, Sorghum bicolor
  source 1..202: mol_type = genomic DNA
gttagtcatcagagcttagccttgttttttttttagcctaggcatgccttacgcaaaaatggatggcaattgcatatttgcattgagcaggccatgtttcagagtgtaccttgaaaatgcttcaccactgttttcctttcttccctgttgagcgatcatcacactcttatatttatgagaaacttcatgctttgttttcagt

SEQ ID NO: 923 - DNA, 635 bp, Sorghum bicolor
  source 1..635: mol_type = genomic DNA
gtatgctttcttgttgattgtcacaagatactactcaactttcaacttatctagagaaacttaccaggtgtaaaggaaatgaaagattctagaaaaaagtactttgttcaacagagaatagaacataatagaattacaaaattgtggttaatttggagaagttgctatcataatggtatgttccttgtgtaataatataaaacaataagtttcacttaaacattcgttcaagaaaaagcttcaccctaacagttaaggatagccacagcatgtgataaaaccatagctgtttttttaatcatagatctattggattatcacttgaacttggcccatgatgtgatttttgcgaatatcttctagttctttgatccacctactgttgttttctaataaagattgtagctatgcctttctgggtaaatgagcacctataataagattaaaactattttccgttggcatgcaacttgcttggtgaattgatttatagtttaactttgacatagataacagaggatgcacagcatctgtttcttagataatttgatataatcttcttttagaaaataacaccaaacatctgcattataatatttaaacgcatgaccgagtcccgtatttttgcatccagg

SEQ ID NO: 924 - DNA, 502 bp, Sorghum bicolor
  source 1..502: mol_type = genomic DNA
gtatttaattacattaagtgccttgttatgttacttggtgaacatacatactttgatttagaagatttttttttaaaaaaagaaattcaaaagaatgtgggtggaggagactgtccttcaatgctggggctcttcgttaccaaatataatacacctaagttcaaccccaatcccagctctttttcgcttttcatggccgtacattctgttttaagtatggtatagtgcccccccccccccccccccctagttgaaccattgaaatactttacacctataccatactgactgagatctgattgtgtaaagcactgttcgagaaataaacatgtttttgccaaataatgccatcaattttttgtttcatattttctcactggtgaacgttttcctttaaatatgatgtttcactcctgccagcatctagccatggagtttctgatagaaggtccttccaaaaagaacaattagtcacaatttaccttattgttgcgatttcagg

SEQ ID NO: 925 - DNA, 315 bp, Sorghum bicolor
  source 1..315: mol_type = genomic DNA
gtatttgattttactaaatgagtgtacacatatgtagtaacttctatgtcaccgtctgtttcagacttgcagtaattggttgtaggtagaccatgacatgcagaagtactccctcttgttaatctgagttcgctttacgtcatttgtacgtgagttaaagttggcttcgtagaataactagtttgacacttttgagttcaaactttatgtgactgcaatgctaacttttcgtcgaagtaccctgagatattttcgctatgcattttaacatcaccatcatgttgccttctcacattagtgttaaatttgtgcaga

SEQ ID NO: 926 - DNA, 79 bp, Sorghum bicolor
  source 1..79: mol_type = genomic DNA
gtttttatgatatgagtattattgttaccatttattctaagacattacatcgagtctaaagaatttccaatggcacaga

SEQ ID NO: 927 - DNA, 101 bp, Sorghum bicolor
  source 1..101: mol_type = genomic DNA
gtacaaaatttgctatttgctcttaatgtctttctggaaactggaaactttgttctgcctgccagtttttcagtcacacataaattatattgattttcagg

SEQ ID NO: 928 - DNA, 156 bp, Sorghum bicolor
  source 1..156: mol_type = genomic DNA
gtatatcagcttaaattgtctatgcacatatagcattacaaattttccaggaaagaaccagacaacttatctgcttgcgcaagtttattacactacatcttgttggatcagtatatgtgtaacaacttattttgggagttctttcctatgcccagg

SEQ ID NO: 929 - DNA, 88 bp, Sorghum bicolor
  source 1..88: mol_type = genomic DNA
gtttgtagttcttgttcatgctgctacttcatattcagcaatcttgttctgctaattttaataacacgctttcttaacttttggcagg

SEQ ID NO: 930 - DNA, 112 bp, Sorghum bicolor
  source 1..112: mol_type = genomic DNA
gtaatgattcgttcacatggtgaccaaatttcattaggacctccaatttttttagcgcaaaggacctccaaaattttcactcttaattatggattgctgtggttcattcagg

SEQ ID NO: 931 - DNA, 120 bp, Sorghum bicolor
  source 1..120: mol_type = genomic DNA
gttaaaaaacttgcacttttttgtttgtttccagttgctatggcaaatattgcaaccgttcagtagttctagtatttctttgtactgaaaaaatatgctctggtattatttttgtacaga

SEQ ID NO: 932 - DNA, 136 bp, Sorghum bicolor
  source 1..136: mol_type = genomic DNA
gtaagcgctaacgtcctcctcccttccttatcctcctccgtcccaccgcatctggtttgttcctccttccccataaaccccggagaaaccttagcgagcggcgattgacaatttgattaatgtaccgttccgcagg

SEQ ID NO: 933 - DNA, 348 bp, Sorghum bicolor
  source 1..348: mol_type = genomic DNA
gttcggtcctgcagaaaccctagcgctcccatgtccttggtcaagttttttttttctgggttccaatgtgctcggaatttctgaaccttatgttacttttgatggttgaaatgggaattttgcattgttttatctgtgcctggttaaaaggaatgccttagtattgtagtactgaagtgagcttttaagagaagcatattacctgacatgtatgtaacttaccctgctggcagtgggatgctgttgttgcttacaactgaaaggaaaatctagcaacacatttgtatgtttcccctgtatatgatgtaattcatggttgctagtcatttaattgacatgttttatagg

SEQ ID NO: 934 - DNA, 108 bp, Sorghum bicolor
  source 1..108: mol_type = genomic DNA
gtgatgcaaatacgagtttgcttgtatgcaggtcctctcccatagtgttatgcattgcaattttaatgtatcttcttttagtaagcaagagttatgcttgtatgcaga

SEQ ID NO: 935 - DNA, 79 bp, Sorghum bicolor
  source 1..79: mol_type = genomic DNA
gtaaaagaaaattattctgaacttttttccttttggactaggtttggctctgtagctaatgagttgttatacatacaga

SEQ ID NO: 936 - DNA, 2017 bp, Sorghum bicolor
  source 1..2017: mol_type = genomic DNA
gtactgggcattgtgatttgtgaccatgtgcccaaagcctgtaccattttttatgttattcgcacagtcacacttacctttcatgttatgaagtaagtgggaaatggcacctggaggtagggtttgcctccttgaagttcttagtcttcttagggggttgcaaaattgtatttgcacagtaaatgggctgggaggatgaagccttggacttgtttggtctattttaagaaatttgccgtgttaacctgggttcttagcctcatcagctcatgtcataatgataaggccaatttcttatggtgcaacagatgccagcaggagttgcttatcatacatatgtgcttataggttctaggttgtttataagttgaacaatacctagataagtttaagggtttatacagtatgctagtttatttgtaaagagaacccctgcatggtcctccactaaataatcattttaatttcttttatgccattgattttaaaagtttggcaacccattccatcattattacctcctgtttgcaacctgctgtttatcatgcctgtcctttgtgggccccaaatgccactcagaaattgttaagtatctgggcagctccaacagtgttaaaagggctagctcatagaatattttattgaataaggagagagagaatgataaggtagctctccatgaagagctaagctcacatacttttctatgattcatcattcatgtgtctatgcttgcacaattttctatatagcatgttagggttactccttttttacctttttttttcaagttcatatgagctagcaagttgactctgttgttgagggtgcccttactagcctaaccattcatctagaaatgatccaatacaagcaattatcgcattccttttcaaatttttttctgggccgaaataaaatgttctttgatttaccatttcttgtaaaaaacagtcgatggggccgaaccctagatatttctgccagcatttcactgctgttttgcagtcctctgatgttaaccatatgtatggtaccaccagtcctggattgtgtttattggtaggatcaatttacattttagtctttcaactttggctatcacttccattactatcattgaccaccttgttgcagttgccaagaactttacctatgttcttacagtggcttccacaacttatgtggtttcctcctgttttcatctgtattgtcttagttgccacatgatgcttagatctccagatatgttgttcatttttagccaatttgataagtccctcagagagatatagcacattatgacagtttgagatggtttggatgtaaatgcaaatccatgtgttctcacttgttatctatcagggaaacacacatttacagaacataaactatcattttggggctgtgccactgttaccatttcttctgtattcccatcagtctttagtttcaaccttaaacacttgatgtgctgctaaccatcattgtagcatggagtgcccaacttcagaaaaccaatggcaatataattgttttatggcaattgttcaatcaggtgttgttcagtgctataacaaatcttctcattgatgaaatatagtgtctccaagcgagcacataaattatctgagctttttcatgaatttcctttgtagctatcaatcaaagatataaatgagattgtcagatatgaaaagatgtcaagtgttgaacagagaactataatgcagtgtattagcatcatagcatgcagttgcagttgaaggttctaacatgtccatggatgactcaatgttttttcagctcttttaaaagcataaaaatagttctgaattatctctgtctgtggaacttattgttccaatcatggaacgtagcttcaaatatttgagactaattgatgtttggtatattagatagttcagcatcacaaaattcagttttgttttgtttgtttaagaaatgttgcaacataatctctgcatgctgatatggttatgttgacctcttcaga

SEQ ID NO: 937 - DNA, 408 bp, Sorghum bicolor
  source 1..408: mol_type = genomic DNA
gtactttctgatcatttcacttcattcattgaagtggtgcttaccttttttcctttttcatttcagagttgcagttgttaactaaagttaaactgtatatttttatgtttagggtactgcacttatggattagtttaccttttggaagttctacagcagtgtcgtttgatatggtttctacttttggacattgtgatttcttgttatgacttctgttttaaaacctacccagttaggatgacctggctgacccatatgaaacagctggagttaatttcagggataattttgaaaagctgctgctttttgtcattacagttacccagttatgttcaattctttgttaagaggaaattctacatagtaatttcttataattgttttgcctaacccttcgaattggccaga

SEQ ID NO: 938 - DNA, 411 bp, Sorghum bicolor
  source 1..411: mol_type = genomic DNA
gtaggaaaccagattaatgcatgcttattttttaaaagatagttcaactgtggtatgcttctcttggtatatgttcttgataacacagcctgtgtaatcatggagtatttcagttcatttgccaagttttcttttggtagttctataatggctgagtatgagtgttttggctttgaaagtagttatttttgagacaatggatagaactctgggctgcaaaacagtaaagattttcgttttagaaaggcctaagctggatgcttgcaacagatgtatgtttctttctcctaaaagggttggaggaaagtagatatccttttgaatcgttcatcatactttcgtaactatgccctgtcattcttgtgtacgtgtcatatttctatatcttctttgataaacattatttgcagg

SEQ ID NO: 939 - DNA, 947 bp, Sorghum bicolor
  source 1..947: mol_type = genomic DNA
gtatttctcccttcatcatacaatagaattttagggtgcaaggtgggctcacctgtttatgaagtacatctatatgtcttggtacaaacttggtatgcaaaatatacaaaaggtttatccattttcttctcgtaatagatcactttcttgggtttgtgtgacctgatatcacttgccattccatagaatactgtcctgtgtgatgctattgcctagtgaattgctttactagacatctattacatgttaattgaagagagttaacaacagatgaagaagaatacagacaccatcaatgttcatgtgcctatgatggactcgttgatctttttatcgtctgatttggtttgtgttacatggtgtgttttgtttgtatttgaatgtttcttaagctaatgtggtattggtttttctttcagttctcccagtcgacatgattgtcaagtgttaaccacataacatagtttcttagcaatacagttcggattaacatgtagttctcaaataaattcttcctgaagcacatattcacatactattggttgtcatctgattcgatttattggctttgtgatatctgtggagatgatcatttgtcaggtggtacatttttatttgtgtcgtgatggtgtatcctacgttatcctttgtccagtttgtgaatccccatcctattgttgttggccatcactcatcaatttgtctgatctccttttctaatgttttacatttaaatgcccatcatccatgtagttaaggaacatttaaattgttaaattcataattagtcacagcccacagccgttcaatgtctctatcatatgtttgctttcttttctgtttttattactttgtccactgtcttataccgcaaagtgtatgttatgtttcataaggctgattctgttttctcatgaagaaaattaatttgctcaatgtatgccaga

SEQ ID NO: 940 - DNA, 4359 bp, Sorghum bicolor
  source 1..4359: mol_type = genomic DNA
gtttgccttcgtctccaatctcttagcatttttctcctggttaatttgacttctcattcgagatggggataacttttgttactgtatggtgctataataatttcatcatttctgagcttgttggtttctttgtggaactactgaaattgtgttcactaattcacttgatagattatgctcttaatagaaattcagcatagtgcagagtgtcatttcactatattttgttatttttaagtaatatatgctggagagggttgcatcgcttttccaagctgagacttaggtttaagtaaatatggtccatatggtgttgggttgtcacaccctggcttttaaaataagaccagagtcgtcatatgtgtgcccaggaagtccacacatataacaaaagaatagaaatatcagaatcaatgttatatatagcagaaaaacatatttataataacacttacaaaacatcagagtacgcggaaacaatagctaaacttcttaggctccaatcttctcagggacggttgactgggggctccgtacgccaagcacttctgataagcctctagaaaactccatagcatctatatccttcttctgagcagcactttactacacactggggtgtgggggaaatagcaagggtgagttcatgtccaactcaacaagtacaggcggaaagtataatgacatgcaaggcttaatcaaaggaaaagctgacactgtttaactgcaggtgagcttttaagttggtaaacttttattacaactctattattaaaacaacctattactaaatatgggtaaagcatcccaacccttaattagatgaaagtatattaacaattttattaatcatcattataattattaccgaggtagcaacctcagatagtaactcggggtagcaaccccattaaggtcatgggatagcaatcccaatttagaacacaggatagcaatcctgccaacacggaatagccattccgccaaagcacgaggtagcaacctcaaccaaatttcgcctccaagtatccagtgaatccaatttgctcatcaagtgagggtctgggccgctcgtgaccgtgagcacggctgatatatcagttttacactctgcagaggtgtgcactttcactccaagtcgtgattcccatttgcccggggtcgcgactccccaaaacacttccaaggtgagcaggcagggtttcactacgagacctttcacagggtccaactaataggatgccactcgtaagtttttgccggggcgcgcggcagccgtgcccatagcaatgggaccccgaactgaccgacctcttaatatgaatacccaagctacttccttacgcctacccggaaagtaacaccctaccagcggaggtcctgataattagtcaagccagagccatatagcctgataattagtcaagccagagccatatagcttggagctgcactgtaagtcccagggggccgctccctgactaagtccttacggagagcagagacgggtacgcccggcaaaccggaccaccaacagtacccgctccccctgtcctcaaccaaaccacgatgctcgcaagcaccgcaacatctccatcaccgaagtgaccattgttcaccatttaatcatttatcatcattgaagaattcattaagcaagatcattattattattattatatagattagatgagtagagcaactaagcatatctactgttcactatactacccatatatataaacccaggtatacaaggaatatagtagaagactagtcatgtccttagggtttgcagtattaagacacatgcaatggaaagtaaatgtatttaaagtttataggtacaatatgatcaaagggtgcctgcacttgccttaattcccagtgtttatctgctcagaattctttggcttctttttttctgatctccaacttctgcttcgattatcggtcctcagcgcctgatcttcaatgctgacgaaccacgcttcttctactcgtagcaaccaagcaacacaaacagacaaacaaacaatcatgactaagaacaagcatcaatcaaaagaaaagcttagaaagagcgcactaaacgacacgacttattgctacgatcgtgacaacgcaagaacgattgagaacggagctatcgttaaacggacacgactttcgaggttcggagtgtaacggagaagacgactatacgctggtcgtattttatttaataaaagaaggtgatagacttttagagaaatatctcaaagttgaattgaccaaattataaagaattataaaagatggagttaaactttagtcatattttaattgtagatggttatatatcatttaagccatttacgcctttgtaattttagaaaacataaagcaagtaagagcagctaatcaaatcctaacatgcgtcgcatgtatattaaacaagttataactaataaagaaccatttaagttgatattaataatgttaacatttatttatttataaaagatctaaattataaacataggttacttttaatccaaaaagacattaaataaatattaaacaaattaattatatactttatgtctaactaaaagaattataattaataaatatttaagttaacttcaatcaagttaatattagattataaaaatagcgaagtgtaaacttagattgtttttttgttaattaaaaatgacattcaaaaaatattaattaaactaattatatttataaacatgggacatggaaaacagtatcgctaataagtcatttacgttgccatggtcataaaacaatagaaaacatgattataactctatattgcttttaattataaaattaggtgcatatattaattaatctaatattcaattaaatatggaaaaaaatatatgacataataaaagttagcactactgcgtagagcgcgacgttacgaaactaacgcaattgaaacggaatgaaacagagttagaacgattgaatggcgaaggattaatgaccagtggcaaacttgtaattactttcatcttctaccttgagattttgtacggaccgaaccaggacaacatgctgctcgtgctgtgcgtgggaaggaagggctcggtcggaccttggccgcctggtgcgcggcgtgcagctgcagcgcggaggagcccacgggtcacggctgggacctgctcgagccgtagcaagtgggggagggcacgaggcctcgccctgctcgagcgagcacacggccggtgcgctggcggcgccgacgcaggacacgacgtcgcactggccagggcgccggtggccggtggcgtgtgatcaggacaagccgaggaagggccctaagtgccgaagaacgcaggaaaaacaaggtcgatctcaccggcaatggaggtttctcgccggagatgaaactggaagatgggaactagtcaaacgataatggattcgcccaaaaagaaatactacggtgaagagaatgacaagggctacctcttcatggtgatggctaacgccgggacgccatggttttgccggaaaaactcaccggagagttcgccggaaacctagcttttgcaaacttcggcgagagatggagggagctacgggtggcggctcgcgatgggatttttagatctgtgatcagcgcgacgagacgaacaccggcatatatataggtctagggtttggaaaagtttcaaaaattattaattacgggatttttagaaattcatttttagttcaaaataattccagaaaaagctgaaatcattttaaagccctgaaaaatatttccaaaattctaaaaattaaaggaaaacttttagagatatattgagagttgatcaatccaaaaaaagtttttggtgtccatgaaaaagaattttagagcatataaaaaaagattttgttctaggaaaatgggaaaaagttctgaaaaagttttggaaaattctcgggaaggatcggacggcgtctaaacgtgtttgtaaaatcttagcatgcacaaaaacaacaaacccaagtaaaaactagagcacaaagcacacaataacaaaacaaaacgcccttcacttttctttacaaaaattttagaatttcacatttttctcattttataatgacaataattaataaaataaatcttgtaatatttttaaatttttttaaatccttatttaatttagtgttttctaataacaatccaaaattagaaaattttggagtgttatatgggttatcctatttgtgttaggaaactacaaattgactgcttggtgcttttgttgagctctgaagatattttctggtagtattcaagagtagcattcaacttattctaccctattttttattagg

SEQ ID NO: 941 - DNA, 133 bp, Sorghum bicolor
  source 1..133: mol_type = genomic DNA
gtaataacccttgtatttttttaattattgcactaattgcatggaatgcaggtcttatttttagttccaggaaatcttttcttgaaactctatttagatatcaacataccatcttcccccaatgttttacagg

SEQ ID NO: 942 - DNA, 1283 bp, Sorghum bicolor
  source 1..1283: mol_type = genomic DNA
gtatgttttcttgcacaatagattttcattacttttgtcgttctatccatatggcgtcattttctcatgtactatgggttttttttttttgcaattatgtactgctgtgcctacaatcgctttctactttatgcatccacaaaggagatctttttatttggtatgatgtgcttgttgtgttgataggaaggttggttgagggtgtggatggtctagggttgttgttgttgtgtcttttaatttcatcatcctattcacaacatgttattctcaaagggtgaaagatctaatcttcagttttgtcgaatgaactttttgtggtgtgtgtgactttgtttgtggattccccttgtactctcttttcttcctcgatgaaatgatgagcagctctcctgcatgttcgaggaaaaaaaatcataacatattatctacagatgcagcaatttctgccttattgctccctccagcagaaatctgcttctgcagttactctagtgccaaaactatgtataaaaattaaataaaagagtatctatggttcttaaagaagtcctaacaatatgacttactatttggcgcataatgtaggtttttggttcttagtctacatactgtacaaagcagagtaatagaactctataggtccagtttatttgattggtaggatgaaccttcttagtgtagcattagaacactacaaacaagttatatgtagaattatgttgtcttttcttcatttcgtttttgatggcttgctagtaaatggttgtgccctttgtttgttctgcttctgacttatatgtggtttggtccgtgtaccttttgttatttttactaactaaaatatacatagtcatttcaatgagtgaggaagtctgtagagaatgcgatatagagtcacatgattctttagtggaacagataattgcactaaaaaaagggtgcatccaatgttgaaagcgggtctactgaaattataatatcatagcacttagtatacattaactctgactaaagtatagtgggtctggggaagttaaattatcatagcacttaatatacattaactctgactaaagcatgttgtatttcaagctagtgataaatttggtcttggatggtgttactattagttttcaaaataatatgttcatctccctggtaaatagctgtctacattttacccttagtaactgcatgaattactttaggctgctgaaagcaccatctacctgtgcagtccactttctttctcaacaatgcgccctttgctaccttgtagg

SEQ ID NO: 943 - DNA, 1367 bp, Sorghum bicolor
  source 1..1367: mol_type = genomic DNA
gtaagtggcttgttctaagcttgctcattcttaaactggtgaccgcaaaagaatttttcctagttggagtgttgtacgtgctacagaagattgcatttattacagtaatgaacaataataaacatgtaaatcttctgcatattatgttatgattgaattgattaactcatctgaaaagctgaagccagtcacatgtaaatgaaaaagaccatgtgcatccactgcttcacgattgtactattatgcatgctgactagtaaatctggcatgttgaaacccaacaaattctacttttcttttctttttcctagttaaaatctccatccttccttccttttatggtatttgagctgtatctgactgactgctccagttcatcaaaacattggattgcttgatatatgcaatgaaatcctagtaaatggccttgttgaggcatttagggccttctcatactttgtgaaggtaggtctggatctaaatccccaggatttagtatgaatgcaaaataagtcctaaaattcctcgagtaacccccatcttccaaacatgccttgtaattgggccttgggctgatgaatcatttcatatagcttgctaattttttagtgtatcatgctttttaatgtattattcccaccattccaaatcataaatcgttttagttttgtcctaagtcaaacttgtctaactatgaccaagtttatggaaaatatattaacacctacaatatcaaataagtgcgctatcaacttctcatgcgagttggctggtatttccatgggagcagtgatggagctggctagtcaggttcttggtgtggttagctgtttgtttctctcttctcgtacgagttgcctcaggcaagagcaaaagaaaagaaaaccagaggtcaaagtggattattttttccctgtaaaacaagaatctggctgcaggattctggaagaaaggaattggcgtttagccatttactttgttccaaacgttcattctcactccctttcctccattattcgattcctgtatctttcctttgaatttctacaatccaaatggggccttggcttcgggtgaagctaaaatgatttacaatttggaatggagtaagcacagcagagaaagaaatccagtagaattgggtaatgttttgctgaagaaatgtactacacttttaaatctggatctattttcttttctacattagagtctgtactaccatgctctatgtgaaagtgatcaataaaataagaaaaagttgtatttttttgcctcaaaactttttgtggtcatttctattgctttcacaaacaattgaggtggaataattcccttattctagtacataattttttccttctttcaga

SEQ ID NO: 944 - DNA, 714 bp, Sorghum bicolor
  source 1..714: mol_type = genomic DNA
gtaattccttgaaggcatacattatcttttggtcttctgactttccttttatttccttgctgctgttgtcttttcagacatgtcttacagaaatgagcattgtgttcatgcctgccatataaaaataagctccctccctctatctgtagggatggggaagccctccctctatccgctcaggcgctcacttgatctggaatggccagcaatgtggcgggctgcttgacactggcgtcccccttgctggtgtcagcacaaccgtgccatggcctcgcgctctcacctgtctcctcactcaattgctagtggcagcattggcaggcgagtgagcgattgcttttggctgcagtgtgcagtgtgattggggataggagtagggttccaggagggtgtaggtcatataagatttaataaaaaagggctgttctgcatatacgtaggggggccagatgagtgaatttggagcttggacccagccccgacctgaatttggggcctcacattgttagcccacacaggggggtgggatgggtggggcaacggagcagatccctgtctttaagggaattttgccatccctatcctccgtaatgcaggagaactgcgtttcattatatttagaagaaacagaggggggtctctctatttaaacatcctattggattgttgcaattgatgttccagcaatttactctaagttgtggaaaaaatagg

SEQ ID NO: 945 - DNA, 81 bp, Sorghum bicolor
  source 1..81: mol_type = genomic DNA
gtgagttttattttttcagttttggtgatcaggcttcgaatatgatatgattgctttatacgagttgtgcatgctcccagg

SEQ ID NO: 946 - DNA, 71 bp, Sorghum bicolor
  source 1..71: mol_type = genomic DNA
gtagtgtttttattaatatatcgcttacctgaaatataaacttttctttaacagaaactactgattgcagg

SEQ ID NO: 947 - DNA, 85 bp, Sorghum bicolor
  source 1..85: mol_type = genomic DNA
gtaaagtatctggattactttttccaataaacgaatacttctctgttacttggtaaagcggctaagctgttctgtgcttttcagg

SEQ ID NO: 948 - DNA, 307 bp, Sorghum bicolor
  source 1..307: mol_type = genomic DNA
gtttgttagatgtcaatcggcttgtcctagcgttgtttcatggaacagtactggaataaatttgcaaaagcctacaaacatcccactatgtgtaaatagtgcacaagtatagtgattgtcatttctttcctttttcttgtatattttatactcttcagccacagataattgactttttggacatcaacacagtactcaaaatgtatgttgatcactagtctatcatgcaatgtgtctacaagttgtaaaatttatggtcaaagttaccttcaaaagttttttgatctcctaaacttttcttttcagg

SEQ ID NO: 949 - DNA, 193 bp, Sorghum bicolor
  source 1..193: mol_type = genomic DNA
gtgtgccctataaacttaaagacgtggattggttctttctctttctttagcgatttatatgtagttgtgtcataatgataggtttgtccctggatttacgtcatttctattagcgattgatgtttgcgagtccataatctacattattggtctgttatttctttctttttaactcttcattgaaaatggcagg

SEQ ID NO: 950 - DNA, 1439 bp, Sorghum bicolor
  source 1..1439: mol_type = genomic DNA
gtaagtcagactcttctcagttgaagtatgttgtccatttttcctacatagcttgggtgaacttttggtgcagcaaactcaatatggcattagagctaatgtcctagttttatacactatatataatggtaatgtgttttcttgttcattgattgctcagaagttaggactagagtttggacaatgtcagtgccctgtggctggtctaatttcttctttccactgtaaattgttctgtaaaatactttcttttctacgtttaatatgagagggtctcgggcgctcctcaggatatactccctctgttcttaattataagacgttttggcttttctatatacatagtttttgctatgtacatagatatacactatgtctagatacatagtaaaagcaatgtatctaaaaaagccaaaacgccttataaaaagatggagggagtggtggtaacaacttaacagtatgtgctaataaaacaaaccgatgcaactttttttagaagagaattttcctttttaaaaaatataaccatttccccctcatgtccaagagtataagattaatcttttttggctctgtatatatgcgctagacatgcaaagttgtaaaaataggcatggcttgtatttttggacagacggagtagttttttctttcattgaggaaagagcattcatgtttggactatcttaatcatgggggacagtggtagctgaaccaatgaaaccgaaagcccagaaactgacttggccaggcaccttagtagatagctcatgatcttgttgacccgtctttcaagccaaacaaggcaacgacgaaatgcacaaatacaatttgagtttaagtgccatatcatgtgccaagcaaggatttctcttattttattgccatgccttctttttagacaatattaccaaattggactgatgattgatatatgggctgggtctgtctgatgacctagcctttatgagcctgagaggaaatccattgctaaaagtcattcagttggttagtccactaggtcttgattacagagattacgaagattagattttgattgatctcattgtggttgttgtattgtacgttatccacatcaacccagtgtttgtaaaagtggaactggtgggacttgtaccaacttctaaaacagtccatttaattaaatagaaaatggaaccagctagtactaagcatgaacttgaactaaagataagataatccatgcattaaggaaccacagttttgtatcaactttgctgtgggcaccaaagcattcactaaaaagaaaaggagggcctgtctgattttaggaaccgggtaaataaagaacagtaacagtaggatgaaaatgagtgtgatgtatcttgtcctttgtttccccttttatttatgctatgttccatattcctggatccttactctttcattgcaga

SEQ ID NO: 951 - DNA, 103 bp, Sorghum bicolor
  source 1..103: mol_type = genomic DNA
gtgcgtgccgttctcgcagctcgctctaccttctcgtcgcagtgcttaattctgccccggccgcgctcggtgttgtgcctgatatcgctggccattttgtagg

SEQ ID NO: 952 - DNA, 365 bp, Sorghum bicolor
  source 1..365: mol_type = genomic DNA
gtaagagataagcataaccctgatatttccaattttactttcgattagatgcccagcgcttgctcagtcaaaataaatattcgggaaactattgaatgaagtaaacctttgatgtttggattgttgcctaattgactaacttaatatttctgcataacaaaatggatggtagttttgtttgtacagcttcagttactaggaaaacttactgtactagaatgctctacattttatatctgtaaattgtgatcaaattcagctctttacatgcgcaatggaatgtactgtttcttcttttaattcttctttgtctgctgctgtaacctcagttcttggtgtgtcctctctgtttcttttattgaagg

SEQ ID NO: 953 - DNA, 167 bp, Sorghum bicolor
  source 1..167: mol_type = genomic DNA
gtaagctgtggtgatcggtggcaaggttcacatcttaaaggcacatgatgcccatgaatattgtgatgaccaatgataacttactatctcaagattggtgttgactgaatcatcagagcacaaagagacgttgctaatttctatgcctgttgtgattatcgtgcagg

SEQ ID NO: 954 - DNA, 684 bp, Sorghum bicolor
  source 1..684: mol_type = genomic DNA
gtttgaaactacatcttgcttccacggtttcacgtttttccttgattattacagcaaatttgtccagtatgtcattttcgtgtgtgaaaagggaattttatcaacgatactggtgggcattgccgcattgggtgaatccatatcaagcaccttttgctgtgtctatgaaaacttaggctgattaagctgtgtattgtctaaacgattcaccatctctagtttttcacgtcagcatgaatgtccgttgctattctacaatgtgtgcgcatttatattttagcttgcatacttgctgttgatttcacatgctaggagatagttctttcatatgctttatattttcaattatctacgatagcaaaattctatgggtgacactttgttgttccatcatcctttgccctattgggatatacagatatgtgttcaacaaaaaattctcgtatattcgaggattgctttttattgtagtctcttacccaaaagaagctgacaaatgaaagatgaaaagtttactttagtttatttttttcgcctctgtattggtttgaagtcatctggagcttgagccttgaggtttattaaggatttatttttacctgatggaccatctgttgtgatgtttagtgtaaattgtttgctctttttcattgtattatacatcctattcttgacttttacagg

SEQ ID NO: 955 - DNA, 95 bp, Sorghum bicolor
  source 1..95: mol_type = genomic DNA
gtttgagttattgcattcttacttgacccaacttcctagtttaccgccctgtattttgaccatattacttgactaaactttctatttgtcacaga

SEQ ID NO: 956 - DNA, 386 bp, Sorghum bicolor
  source 1..386: mol_type = genomic DNA
gtatgcatacattatttgattactagttaaaccaacatgattcctttttaccacctcatgttttctatttaatcagtcattgccccttcctgaaacacttttgtcctgatgatttcgcttttgtgagttaattcgtgtaatactacacgacatcagaaccatgagttttagtcaaagcttgagctatccaactgagagtttcatgtttaaatagtgtatcaaatcttaacgtagacacgccatctttcttcgtggtccaagtgtcaaatattgtttgatgttcaactcttcgcactttgtatgtccttcatgaacgcaagatatttacaaactatctttgagtacactttcatgaacaatgagctcactggcatttggtttccagg

SEQ ID NO: 957 - DNA, 172 bp, Sorghum bicolor
  source 1..172: mol_type = genomic DNA
gtaagtaattgtccatattgatattattaaggtttttcaagtatttactgtgtgttcctgtgagtttgtggaacattagccgtgctgtttggtgtctacatctttcagctgcacatatcaatgccatttacatttcaccattctgataatatattaatatgttttcaacagt

SEQ ID NO: 958 - DNA, 150 bp, Sorghum bicolor
  source 1..150: mol_type = genomic DNA
gtaaaatttgtttatgctgcaatgctaaagttgtttggagtacagacatttcttttaagaatctcactaatagctacattgtatttggattttagaatgaagcttatctctggcttctgactctgcctctctttctctctcatgtgaaga

SEQ ID NO: 959 - DNA, 101 bp, Sorghum bicolor
  source 1..101: mol_type = genomic DNA
gtatggaatattcagatactgtttgatttgtgctttcatatttttttaaaattcataacagtttagctatggttgctcaatattgatcttccacttgcagg

SEQ ID NO: 960 - DNA, 154 bp, Sorghum bicolor
  source 1..154: mol_type = genomic DNA
gtatttttcctgtgcatattagggcagatatactcttcagatattacttagtatcaaaaagaaagtggaataataatggctgatgctaattattctagatcttatttgtttcggtgactctgacgaatgtcatgtgaatatgtgatacaacaga

SEQ ID NO: 961 - DNA, 91 bp, Sorghum bicolor
  source 1..91: mol_type = genomic DNA
gtaaagacatggaaccttgatcttttctgtgttaaattcaatttcaacattcatgttaatttcactcactaatggctgctttaactttagg

SEQ ID NO: 962 - DNA, 281 bp, Sorghum bicolor
  source 1..281: mol_type = genomic DNA
ggtacctgccacttgacattctaggggcctcaataaattggcaatcttcagtaatcactgtatttctgctatcttatcttatcttaaacttataatgccagtaaaatgtggtgaattgcaatgctttatagcagtgttataactgagttatgaatacaattattcctcgtgaccctaaaaaaataattatttctcgtgacctgaaaaaaataaaacaattattcctcatgaattcattttatgtgaatgaaatctaagtgatttccctttttctcatgcag

SEQ ID NO: 963 - DNA, 124 bp, Sorghum bicolor
  source 1..124: mol_type = genomic DNA
agtaagtacagctgattgattctcgatccccatttaatgtactcttgttgtcaatattgtacatgttagtaattttatgtacttggtactgtcatttaatttgactttttccccctgttgtcag

SEQ ID NO: 964 - DNA, 91 bp, Sorghum bicolor
  source 1..91: mol_type = genomic DNA
ggtgctttcttcaaaccctgcatggatatgtaagatgggaagtgatatatgcgaatgctgtggcatttatcagaattctatttttttgcag

SEQ ID NO: 965 - DNA, 1145 bp, Sorghum bicolor
  source 1..1145: mol_type = genomic DNA
ggtttattcctatttctgtcatcaaaactgcaatagtctgtcatcaaaactgcaatagtttttttgttcccaaactattgatccaaaatggtataatattatggccaacgatcatcttttgagtgtcaattacactgtgttgcagtgatgaatttattatagcttttgatcttacattactctgagtaagacagaaatttagcttgttgttgctgtaaattaagagataaacttcatacaagacatcccggtttcttgtgagcatttgtttctgttaattgcgtagtaaaggaactggttaacaatgtgaatgtacagacttcactggatggccatttcacactgtacttattcttgtcctgtggcaatatcaatggagttcatgggaacaagggtcaaggattgccaatctgcggttcacatgattgcagcactatttgttcatgagtttctacgagttgtactcatttacattgtcatactgaactaaagcttcatattataatgtaacatttatgaccaacttgaagaatgaggtcacatcaatgaatggatttgtagatgtagagttgccaatgacagtcttgcatacttatagaagcatcttttggcatatagatttgctactatttaggaactgagatcatggtttccttggttcatccgcaaaatgaaatagattgtaaattttgaaactttggtatttcttttcttctggacaagatagttgccctagcgagtacttgccaattgctattattctctggaactgtcttaacctttgtttggcactatcttggttcattaccttcttgtagttactatataaacattggtctctacttccaatcgaatactaccgtgtgcttcatttttacactgtcaagtgatatcgataagcttttgtagtagttcagcccgtacatcatgggtatgaaattggcactaaaaaatgggtgttatcaaatatatcttgaaaaggttattaggtgctagaaattataagtttgttttgccttgagcttaattttgttggtatttaacctttttgttagaataaacttttaactttatacagttggttatgatttttctaaaaagtcagaattaggtgtgcatctctaaccatctactaacaaatgcag

SEQ ID NO: 966 - DNA, 376 bp, Sorghum bicolor
  source 1..376: mol_type = genomic DNA
ggtattgacattttattttccattggtcttcaactcttcagaactagcaaaattgtttaatgggagttgaagtcccctaatgaagttaagcgtgctagtaaaacttgttccctgtgtaaacactacttttgacctggttgtagaatctgtttaatgttattttatgtttgcttctgttgcttaacaatgactgtagataccttttggtcttcagcttctcaacatgtagactaattttatgcactgttttcttttataaatatatatgtggcaagtttgatataagtagtacttctagcaagaggccatacagtaggcatctatgttaaacaaacaaaaagatttagattcttatgcatctccattacaatttcag

SEQ ID NO: 967 - DNA, 1338 bp, Sorghum bicolor
  source 1..1338: mol_type = genomic DNA
ggtacatcatgctctccattttttgttgtgattactttcagatgcaaaattactcgtattgctcataaatagggctgtatcgatctctggttctgtgctcttaaatcaaagtttattttagcgttataataaacttggtgttcagtttcttttttttaccaagcagacatatatacatattgtttaaatagggttgctttgcataggaaaaatgtaattattgaattttatggatgccaacatcaagtattgtaaaagcaagaatattgatctggattgatcaataagattgattattagataagactgcagactggtcaatgtcggtgggaatgctgcctgctgcatggaaacaagggcaaaaccaggctattttactgctgtgaatgggcagcaatggatattttgatatcccaggctaaaatgttgtcgatccaaaaaaacaagaccaatgcttactactgacatctatgattctctatcctggatctgctcatgtggcaagtccgcaagtgaaacgtagattgggtcgaccctagatattttttgccggattgcttgttattcttaatgctagtgtttatcttgttttatgtgcatagatgatgtgtggataaattagcatagctcgtactgagttatgttagatccattcagattgttaatgacaataccttaaaaatgttagccagcattgtctcaagaaatcaagttttgaccctccaaagtgttagcgtgcagatcatacattatcactagaaattcaatcagtaacacataaaaccgggatacttgttattttggccattcttctagaataaattgaatggtacgttattcattaattcctattccctctgttctaaatcataagtcattttggcttttccaaatatatagtctttgctatgcacatagaacactatgtcttgataatagcaaaagctatgtacttagaaaaaacaaaacaacatataatttggaatggaaggagtatatagtatttgaatgccatcctatccttgactattattgtgtgattgggaaaaatatttacttgaaaatggggaattctcatattaccatgattagtcacctggtgagaaattgcatcttactgcagagccactgtgaacataaaccatattcgcaattagagttgtactgatcggtattagtcctttatgctctcaatatttacttctacttttgaggcattctcttgtggtcccctgtaaaagctggatgaattttctcgggcgcatggatgctgtcctgctgatggtgtattacattataaatgctgttattgactagtgtcatctggtggttttgcag

SEQ ID NO: 968 - DNA, 403 bp, Sorghum bicolor
  source 1..403: mol_type = genomic DNA
ggtaggttctgagaatacctcctttcgtgcttgtttaccaagtatttgttactgcataaaccacatcttcttgattggcattcattgcttttattgaattcttttttttaaaaaaaatggaaatgtaaagttattattgtgattgcatgccctcacaaagatcagccacccctttacttatatatgtctctttgaatcatgatgtgtattaaaaaggtcagcatcataattaatatataatctgttgcttgtcaaattctagaactcatgattgagggcagtcatttgtatagcaaatcactgtttattgttccagtctcttgaccctttttcatttaatgcctataaattctttggtagagcacattgcttctcattaactttggccaatatactttgtcag

SEQ ID NO: 969 - DNA, 86 bp, Sorghum bicolor
  source 1..86: mol_type = genomic DNA
ggtatgtatatacatttccttttactgatcctgtcctttgtttgtgttctacctccgtatgccttatcctctttcctgttttgcag

SEQ ID NO: 970 - DNA, 917 bp, Sorghum bicolor
  source 1..917: mol_type = genomic DNA
ggtaactcccgacccgaccgatccctccaccctctctctctctctctctcttcctcaccagctcgctgtcctgtctccgacccgacctgacgacctccctccaagtcgctggtgccagtatactgctctatcagcgcgcgattcccccgtgtggtcggctggttctcgccgagctttcagccatgatcccgcggctcgcccccctgaaatgggttgtgcccgtgccagaggggatgggtgtcaggataccaggtattgatggggcccgttgtggtttggtttgtcgtgggctcacattctcggtgtacactttggaggcaccggtttggtgaggacaacggactccatctggttgtgctgtctgttgtgcagtcaggataaatctgtgcagggtaaggggggaagagttggggaggaaactgttttagagtggtagcctttatttgatactgctcctcagtttctcttgaagtagaatgtgaaatattgcctctgtcctgcttgtgctgtactttatggtacatatggtatccactatcctcaactcaaggcagattccacgatgacttttcctcttgtactctcagcttgcagcaagtttaggttgtaaggcattgcatcgttgtcacattaagattccatatctttttatgagcaactaacaaagtcacgagaacagatcctaaagtaataacgctcacaaaatgaactttcccaggatataaacagttctaattgattctgggttgcttcaatttctatgcaattgttaaactatttgctaaattatgtcacttctgcttcttcttcttttctttgtctcagtaccacttgcacccttttttctactatgagtttatgacttgactatcaccattttttattcttacaagatttttatactcttatttttttag

SEQ ID NO: 971 - DNA, 98 bp, Sorghum bicolor
  source 1..98: mol_type = genomic DNA
gttggtgctggctccatctcaccggtggtgttcatacaaatctgttgttgttgggcattcacggtactgacactggagttgcttgtgttctgtgtagg

SEQ ID NO: 972 - DNA, 99 bp, Sorghum bicolor
  source 1..99: mol_type = genomic DNA
gtgatttaactgaactggattatgtgttttcatgaacgtgcattctgcagtgtaagcttcttccatcccagctggaccgacccttgttgttcctgcagg

SEQ ID NO: 973 - DNA, 109 bp, Sorghum bicolor
  source 1..109: mol_type = genomic DNA
gtcaagattacacttctctgttgcttaaatatcaggtttttctgtgttgtacgaagctttttttcttgtcagcacactaacagtatgatttgatgtttatattggcaga

SEQ ID NO: 974 - DNA, 815 bp, Sorghum bicolor
  source 1..815: mol_type = genomic DNA
gtctgctgccttcataatctgtcaccctatacatcatagtttcaattcttctttccgtttgtttaagaataatgtataatggtattttcaattaaattgggtcaaacagcaaccttaattttgaaatgtcattttgtagcatttgacctttgaatgacttgcctgtgtaaccaattgactgcatctattgatagcctgttatttttcaaacttgattttataacttcctgaacagagtgcatgtgtatatgtgtgtatagaaggtagtgggcaaggttttgtaagtgaaacttcactaggcattgcagggcatgaaagatcttagcatttgaatttcaagaatgcaaaacttatctccggcaaacaaacaaacaaacaaacaaatgaaccaagcataatggatcatgtttctggaatcatcctatacttgggttatgttttctccatgttatttaaaatgtcttcttcaaacacactggatttacagtgccaagagacgattttctctctggatgctatggaatgcccacccatgataggtgaatgttactagggacaaattttctttccttaaaaggttgtttagaagtatcatcctaaagcatattgtgctgcattagatcaaaaaacatgttaaatgatgtaaaatcacattccttcaaagttggaatgctactaattagttgagtgttcttcttaatgaaatgacatgcagctctcttgccttgttcgagaaaaactaattagttgaataaaccaagggattttatgctactcaaatcacttagcagtttgctgtgcaattgcttggcagg

SEQ ID NO: 975 - DNA, 73 bp, Sorghum bicolor
  source 1..73: mol_type = genomic DNA
gtaagatcgttgcctctttgctcagttgccttttgttcttgtggtattattaatgaagttataactctgtagg

SEQ ID NO: 976 - DNA, 509 bp, Sorghum bicolor
  source 1..509: mol_type = genomic DNA
gtcagtgtcaatgtgaaatgtcatgtatacttttgctcataagattttaaatatattctctcatttatgatctcaattctcaaattgttttgggaagcataccagtctcatgtttcttttttttttctttttttgtaaaaacattgcaaaacacaataatgatttgttccatttgcaatgaattcagatcaaccattaggtctttttttctgatggggaggatttgcacggtaaacattgagatgcaaaactagtaacatataattcttgccatgagactcaggagttgctattcacttgacctgctgcttctcatgctcattagtctggatctacttactgcatttcacatctatcattcttcttttccttaaactttagctaacaatagaacacaagacattgacgttttgttcatttttcttctgcattggagtattgttagggctggcacattgttttagctgctcatttttgccatactaatctccactgtgcatatttatagg

SEQ ID NO: 977 - DNA, 78 bp, Sorghum bicolor
  source 1..78: mol_type = genomic DNA
gtatcgtttacatctgcaccagtcttgatctttgaatatgctatgcatgtgagtttacattgttgtgctgtttccagc

SEQ ID NO: 978 - DNA, 132 bp, Sorghum bicolor
  source 1..132: mol_type = genomic DNA
gtaagttgtttcgttaacattattattatacagtatatgctgtcctgttcgttgcaaaggggccatcagatacactagttatttggtgtatttcgaggtggtcactgagattgcacaaactgtattgacagg

SEQ ID NO: 979 - DNA, 147 bp, Sorghum bicolor
  source 1..147: mol_type = genomic DNA
gtatgtctatctctccctctcactatacatatcacactgtatctgtctcatacatacatgcccaaatttatcagaggcaaatactgaaaattgaaacatcccatgtaattgaatgatattaattaacactcggctacttcttgtagc

SEQ ID NO: 980 - DNA, 90 bp, Sorghum bicolor
  source 1..90: mol_type = genomic DNA
gtcagtccatctcccccttagcttgtacaacctttatctcctgtctttccaaatatgccactaatcatgtctgtttatctatcttccagg

SEQ ID NO: 981 - DNA, 336 bp, Sorghum bicolor
  source 1..336: mol_type = genomic DNA
gtatgacctgcttctccctttacttcggtgttgattcagcttcttactaataatatctctatcgttccattatgctattttcaagtgtttatctgaggctattgtcaaggtcatatcaagccaccgggtttctttatcttctttctttgcttatgagatttcgtagttcagatatgcctcatatgtggttaccagctcagtctgtacagtgatataaattcaggaaaaataagtatctcaactaatataccaagagtaaaaatggaagttaaaaattttgtttacactctgtggctgaagttacctcttttttttttccctctgtcaatctatagg

SEQ ID NO: 982 - DNA, 285 bp, Sorghum bicolor
  source 1..285: mol_type = genomic DNA
gttgttgcaccacctgagaggaagtacagtgtctggataggagggtcgatcctagcctcactcagcactttccaacaggtgtgtgttgtttatattactttcagctgctgctttttatttcttctaactcataataatatggctggaatgaaaacacttctgaattttgttatgatgtggcattgatgtaccagatgtggatatcgaaggaggagtatgatgagtctggcccagctattgttcacaggaagtgcttctaggttttctcatcgcctagtctcaagt

SEQ ID NO: 983 - DNA, 634 bp, Sorghum bicolor
  source 1..634: mol_type = genomic DNA
ggtacgtcccccacgccccgcattcccctttctccccggtccccgtcagcgtgacctgtccgagtcctcctctcctcacgcgctggccgcggttgagtcgattgatggcggtttccgggttgctcgagatcagtgccgcgggtgctctgatctgtgatgtttgtggatatggcggcgaggccaggtgactagtttttggacctctgctgtagggagtattctagtagaattctcacaagtcgcgcctaagtatttgtgagaatttttgagatttcaactggtattgtgattggggtgcggaatttagctttccttgaagtgtcaacacgttttttttaagggattagtgtttaagtggtttttggtatcggtgtgtagtgttagatttagctggaattaacgagaactgcatacaagaaattaaatgaacatttcgaacttagaacacccatgtatcatgtgcctcattatgctggaaactgcttctccaacctaattgtgcagcccttaaaagcatccactgtaacacttatgtttctgtctgtattggatcgatgcagtatttgccctttctgtttatctgggaaggctaaattaaacaagagccagctttaattgcttaagttacctgcag

SEQ ID NO: 984 - DNA, 74 bp, Sorghum bicolor
  source 1..74: mol_type = genomic DNA
ggtagagtcgcgctgtgtatctctgtttcgtgttttagaaagaaatgctcaaatgccttttgatattctcatag

SEQ ID NO: 985 - DNA, 216 bp, Sorghum bicolor
  source 1..216: mol_type = genomic DNA
ggttggctatctggctcttgtattttcattttctttctttgcatttttctattatcctcccacttttctgttcatactgcatattgtgcttggagtattttgtggtgcttaccatctgactcactgtacattggatgttgccttgttattatgaaacatttaaacagttattctccttccatttgtctaattgtcctgttgcccatgttcattcag

SEQ ID NO: 986 - DNA, 219 bp, Sorghum bicolor
  source 1..219: mol_type = genomic DNA
ggtaatttgatatcctctgcctcagttgttacattggttcatgtagcatgttttatgtcacattttgtagcctttgtggaatctgtagttacctgtgcttgtccattgactgcaattttgggacacttcatcaaaagaattagggaaagtaattaaattgatgtttgttttgggcgaattgttgaacaattcagttatattggatgtgctatgtggcag

SEQ ID NO: 987 - DNA, 82 bp, Sorghum bicolor
  source 1..82: mol_type = genomic DNA
ggtattacctgttactgtaggatgggtggttaactatcaagtgttcattaagtttgaatcctttatttatgaaatattgcag

SEQ ID NO: 988 - DNA, 523 bp, Sorghum bicolor
  source 1..523: mol_type = genomic DNA
ggtacagttttgtcaaatgatttttcttctgaagtgtggatatatcttggtcaaatctaatggtggcatcacgagataagatttgccaaatgctgaagtgtagtgagtagttacttaggagttacctacatggaatggtgaatggtcatctgaaattctaaataaagaattcatgataaaacatggtagtttcataccattcattctcttcccattttactagaagaagttgctggaaacctataaaagtttaagatatgttgtttcatcattacatcaaacacctttctccttagtcttatacaatgtacactcctatatatactccacattggctggaaatgacatgaacgttcagtacaaatctgtaaattgattttcatacatactagcatggtggcatgttatttgttagttaataacttttagttggagtaagatatggtttaagtttttttccttttgtgtaccatgaaattatttgtttgatgtcttattttatttggtcttgtcatggatttag

SEQ ID NO: 989 - DNA, 102 bp, Sorghum bicolor
  source 1..102: mol_type = genomic DNA
ggttatccttttttttttgtaaccattcaggttatcacacaaaaaatacctttttgtttccttgcctggcattaaaatccgtaagcatttcaactgcaacag

SEQ ID NO: 990 - DNA, 114 bp, Sorghum bicolor
  source 1..114: mol_type = genomic DNA
ggtacaattatctcttcctcctaccttctctccctccctcaccttctggtgggatttcagtcttttatttcttttgaagaaaatggatgatgctgtactaacgctgtgctacag

SEQ ID NO: 991 - DNA, 369 bp, Sorghum bicolor
  source 1..369: mol_type = genomic DNA
ggtaagaacatatttcaacaagttttgaatctcctagatcattgctttgaattgtttagggtacatgcatattttgagctgcttacttagctgtctgttttgaaattactgtattccctgtttagttggtgttgtcaagttcaggaacctttctgatgccggttcaactaaaactctaatcttgcagttgcaaaggaatttagataccgtttcattattacttacaaagattacaattgccaacgtggttccttggataatgacaagcatatgtaaatattcttgagaacagtacttccaactgtgtttgaccttgtggatgacttcattcttttgtgtgacatgctgacctctgacaacttcatgcag

SEQ ID NO: 992 - DNA, 71 bp, Sorghum bicolor
  source 1..71: mol_type = genomic DNA
ggtaagtttaatgcaattcaaatcttgttctgtgcattatataaaatgctgagcaatctgttccaaagcag

SEQ ID NO: 993 - DNA, 86 bp, Sorghum bicolor
  source 1..86: mol_type = genomic DNA
ggttgttatctcgctcaaaagtctcttcaataaagcaattatattcctgtggacctaattgttgtccaacttcttaatatttacag

SEQ ID NO: 994 - DNA, 97 bp, Sorghum bicolor
  source 1..97: mol_type = genomic DNA
ggtaagataattgtcgcctcagaaatagtaatatgcactacaaaaatcatacggtaaatcctgacacaacctctttctcaaatgtctctgtgtgtag

SEQ ID NO: 995 - DNA, 445 bp, Sorghum bicolor
  source 1..445: mol_type = genomic DNA
ggtaggcttctctttattactttattcctataagtagtaggcttttatcattcaattattcatgagaacttacagcatccttgaccatgtcgtttttttagttaaagttcaattatataccaacttaacttaggttaaactggcagggtatgcactcttcttttcccaaaaatgcaattggaacacaaataaactcatgttgtcgagcatagacgatcaacttctcttcatacagacatagatttcaatgtgatagtaacatatttttgaggaaatgaaaagattttaagttctttttcttcacaagatataagctggatgtggaaatggaattactagggtgatagcactgaacattttccatgcattgccattccttccacttgttttattttaattccatttcaactctttgacatgggcaactgtgttgggctgttggcag

SEQ ID NO: 996 - DNA, 1236 bp, Sorghum bicolor
  source 1..1236: mol_type = genomic DNA
gtccgccttctcgtctccccccactccctccacccccatgactcccgattcgtagcggaattgtgtccttcgtgattggtagtatcaccggagtagcggtgttgactgctctatgtgccgatttggtagggtttttagtgcggttcttgcccgctggggggaaaggatcttggtttttttttttaaaaaaaaaaaatctgggatagtggactgctggcttcagtatggagattctctctagaacgggctcttatgatggtttccgctactaaaaaaataaaaaaaaacatctgggatagtggactgctggctgcagtatggagattctctccataacgggcgcttatgatggtttccgctactaattaccgtggttttggtgtcgtgtcttactatcttcgcctgtcgcctaagtcttttttgctgtgatgaatgaacaagtaaatctaggaaatttagtgcctaccatcaattgtgacagcccctctgttatgtggttagggaagatgcaaatttcccgcaagcacctgtcctaggaattcttttcataacaagggatgtaaagagttgacatcattactaatacagattatcactatatggctttgacatgttggcaatggcctcatcctctagttataatgccaaataattgcatcatggttggtacctgaatataggcgaaagcgtctattatcgtaataaatacttcatttgatatatggtttttttttgctggcaatgacaatgtcaaatatgactttatgatcttaccagtaaccccagtgctggatggcaggtttattttcccaagttacactttgcatgattagatttcaagtagaaaaggttacttatggtgcttatgcattttaatggtgttactcagattctcagtcacattttaggaaataaaagcttatcttgagtcatttttggtgcacaaaagaatttcctagtcaaacacctttctgagttaactatgaacaccactgtccatattcaagtaatacttgttttctaatacctgccatgttcaatatttttattccatgcctttgtccatgtttaatcatttttcctctctaccattttttttggccaagtgcacttaaagctgactcacattccaaaacttgtgatcataaattctaagtaacactgattgaaagatgggttaaggaataccattctaactcggcaggttctctgacatactgccttatatatttcagg

SEQ ID NO: 997 - DNA, 117 bp, Sorghum bicolor
  source 1..117: mol_type = genomic DNA
gtactctacttgcccccacaataattatatgaatctgaaacctttctataagctccaaattcttttaatcttcttttagcattgtgtggtcctaataaaaactgttgcacgcacagg

SEQ ID NO: 998 - DNA, 295 bp, Sorghum bicolor
  source 1..295: mol_type = genomic DNA
ggtatgtcttgtctatctgatctatcccactggatctgatggttttccccctttcccctccggggttgtggagacacgagccctcctggatctagggtttatgcgccattgctctttcgctgtgcctgtagatctgaacaatttcgcctagatctaagcggctcgtgacattttcgacgagttgagcggattttctcgtagaattctcgtacctctcactctctcagtgatagctgcggtagacgcctgacagccttagtgatcgattatgatgcatttctcccttgtactgcag

SEQ ID NO: 999 - DNA, 1352 bp, Sorghum bicolor
  source 1..1352: mol_type = genomic DNA
tgtaagtgctgaatgctcttttgcttgacgttacacattgaattttttgcatctgcatcatatcagtttctgttgttgatatttatttggcatgttctagttgatagttaacaatctgtttgcaaattgatgatgcagtgatttatctgtttatgctttgcgccaataacatatattgatataatatatatgtgggttgtaactcacggaagtgttatatgcataggttgttcactgttttgctaacatgtttttattggctatttgctgtcgtagtctagcacatacattctatcttgtatgtctccagtacacattttccattttgtaaatgatcagccacaaaatgacgctgagaagcctggtaataaaaaacatatgggtgataacaggaagtgttatgatatgcatatcacccatttctttttctctggaatgcagcacaagcagacttgttgctcactgtgttttgctagcatgtttattgagtatttgctgtcatagtttggcccatacattctatcttgtatgtctccagtacgcattttccattctgcttgttatatacatgtaaacgatcagctgcaaaacgatgctgaaaaagcttttaatagtaaacatatcggttgtaaccccaagaagtgttatgatatgcatggcactcatttgtttttgtccagaatgcagcataagaaaactagttgttcattgtgttggaaacatgttttttgatacatttgctgtagtgtagcacatgtattatctaccttgtatatttctggtacatttaccattctgctcgttatatagtccatgtaaaatttgtaaatgcaaagctagaagtgttatgatatgcatagcactcattttttcttctgtagtgtagcacattgattatctaccttgtatatttctggtacatttaccattctgcttgttatatacatgtaatttgtaattgcgtagccagaagtgttatgatatgcatagcactcatttcttgccttgggacgctttgaatatactttttactcatgcatagtggttatttgttgttgcagtgtagcagatgcatttttatctgtctgtcttgtactcttgtatatttccagcatatgttttatagattatttgtcaattgttatacatgtgttcattgagctggtaaatcgttcagcttgtatgtaataatttgaagggggctgatgttttttttttacttcaaacttccagtcttctagttgatattattgtcttaaaagcctggagtgatatgccactatcataatatgcttgttatttctgtacagacttgagcatgttcttcaacattgtttttcttatgtgtgcag

SEQ ID NO: 1000 - DNA, 111 bp, Sorghum bicolor
  source 1..111: mol_type = genomic DNA
gtaatgattcgttcacatggtgaccaaatttcattaggacctccaatttttttagcgcaaaggacctccaaaattttcactcttaattatggattgctgtggttcattcag

SEQ ID NO: 1001 - DNA, 119 bp, Sorghum bicolor
  source 1..119: mol_type = genomic DNA
gttaaaaaacttgcacttttttgtttgtttccagttgctatggcaaatattgcaaccgttcagtagttctagtatttctttgtactgaaaaaatatgctctggtattatttttgtacag

SEQ ID NO: 1002 - DNA, 88 bp, Solanum tuberosum
  source 1..88: mol_type = genomic DNA
ggtttgtccccttatctccctacttcaatagatgtagttctatttggaatttttgtattgaccgacttgtgtttgataatttgtctag

SEQ ID NO: 1003 - DNA, 97 bp, Solanum tuberosum
  source 1..97: mol_type = genomic DNA
agtaagactcgaaaccctaactttcatgaagaggaagtttcatttgttcatttcgtttttgttttatatgttgtttattggttaattttggtgacag

SEQ ID NO: 1004 - DNA, 90 bp, Solanum tuberosum
  source 1..90: mol_type = genomic DNA
ggtattgtatttttagcatctcactgtttcctattttgaaatgttttgtttgatttaagagatgggctaatcaattgttcgattctgtag

SEQ ID NO: 1005 - DNA, 102 bp, Solanum tuberosum
  source 1..102: mol_type = genomic DNA
ggtatggaaaatcgtgtttttgatttataagcttctccatttgcgtaattttatgattgtttttgtattcaatttgtgcttctatgtttttcggtgcttcag

SEQ ID NO: 1006 - DNA, 369 bp, Solanum tuberosum
  source 1..369: mol_type = genomic DNA
ggtgagtgacttgtggctgagcaatatttaacattcaattaatagattgaaaattttacgaattttgtaaaggataaaaaactactaattgtattctattagcaccaaatatgagcatttttattgaagccaaaggtggttcaacatatattagtcatgtataaacagtgtaattttccgcctccgtccatgaatatgagtatgagctgattgagtcgaaattcatagcgagattaagatgacagagttttactagtcaaatgtcaatattctctaaagttattatgtaatttttgaatttaatagttacaccctaattgaagtgaaagttaatgatttttttttattttttgtatttaataaatgcag

SEQ ID NO: 1007 - DNA, 4138 bp, Solanum tuberosum
  source 1..4138: mol_type = genomic DNA
agtaggtttcatgataaaattataactagctttcttttgggctatctctttcattatgcttatgaagatactagtgctaatattttgcacttgtggtagatggggtatctgacatggagttttaacatcctaaactatcattagtaactcctagaatgggcccctgtgtgatattctaattagtagatagtattaagaggacaatttgtggattaaagcacatagtctttgagtaaaatgattgttactgttcaagtgttatcctggataccttgcctttaggagaagaggggagagaagaacttgctgtcaaagtatttcctagaaacatatgttgattgaacattaaatataagaacattctcttgatagtgttgcccccttcatcactacaaagttgtgctccattatgtggttggatatgcctttagatagtacctcgggtattaaatatatgaatattctcaagtttctagctcttgaatttaaatactcaatcaaactcgagaacaagaggtaaaacacttgcctaataattgaacagacttatgggaagagactatctttagattaaagatatttgagagattgtatccttgaaatcaaatattacaatttgttttttcttatcttttagtttctacttttattgaccacacaaaacttaaatttttggatactttcccttcctcaatttattgttctgatagaccagagccttaatgatggctcacgatttgtacccttagtgatttcaatcaaatactcgagacttagtttgaagttagttatcttagtttgtttaccatgagcacagattcggtctgtcagagcatgaaaaatagatgatgttaagaggaccatgagaagaggaggatcattgttgaaatctcattaatttgttcgctggtgctccagttataacttttgagtttatagttgtgaatacaaactgtattaatacatgagattttggaattctataaaatgagattcatatgatttgggttgttgcatactagtagggttgcactcaactaaaggctataaacagtttatactgttaagctcacgtagcgtgcttctggcatgatctacttccccgtatgattgattgcggggatcagatgagaatatgtttctcatataagatgagcactcccattatgtgtgagtggaaaattttggaaattagaattctcccataagggttggttgtacgagtctattagggtaaatacataacccgggtttattctaaatatatatataagtaaagctacattgtatgacagagagatatatgagagagaattctcaccctatatttaccttatgtcatcgcttatgcgacgtaaaatagttttgttaccaatgaaagaatgattaactcattaatctatacaaagtaggagtaaagagaacttacaggttatttgtgtagtggtgacaaatgatttaggatgaactgcggatgcaattacctgtctgtgttggttgtcacggtaaattggagtagccccttattgcacaatctaaactcaatttgattatgagaggagaacataggggtgcgcatcgtcggttcggttttatgtgttattgattcggtgagattttgaaatcaagaggtattattgtatgtaggggtgcgcatcggtcggttcggttcggttttatgtgttattggttcggtttatcggttttcggtttgtaaatacttcagaccgataaccaaaccaataacatatttcttatcggtttttggttaatcggtttatggtacttaacggttcggttttcggtttaaccaataagaaaatactcatatatattatatacacgataagaaaattttcaaataaaccatatgatttttccagcatttggcatgaaagtaataatcgtaaaagtaacaatcatttttcttgcaagtttagacactagacacattcaaaggaaaaagtgtgaaagtaacaatcgtttaaccattaacactaagactagtaaatttagtatagtcttattgggttatcggtttaatcattaacaaaaatcataaaatcggaaaccaaaccaataacccaataaaaaaatttgcaaaatcgttagcccaataacccaatatcaataaaccaatagtgtttttttcggttcggtttattggttaaatcggtttttgcacaaccctaggagaacatggaaaatttgagagttctatgtcttatatatctctaagtcgtacattgtaggtatactacagaataaattagggtcaatagtaattactacaattactatatttaccccactgggcttttagagcatcccatatgggtggactctaatttccaacatttgagtcccattcctttacaatcctttcctacttccaccaaccctttacctagcttttggctctttctttccttttcttttttcttccacctcctcctgacactatcttcttctcgctacaccactgtcccatgatatctatgctcatcggtattaagccaccccccatagtgttagaattagattcttttaaaatttctttaagttagttttcatctttggatctctgtgctttgctctacagtcgcaacattgtaggccagattgtcacctttaagtttgtcatgttcaaatgacttcataaacattgaacttatctagcaattgcagatatcctatgtttagttggtgttactgtttttctggatacttcgtactattttatttggtaaaggttgtatttttattttgttcttctcatagaagattatcttctactctgtccgtttcaaatttgtttgttttgtacgaaagctgctaaactccaagattctagtatctgcctgggtttaaatgcttgtcattttgcatccaatttacttcactacactcaaagttgatggattgctgaatactaatgattgtgggattaaagtttttatgggtcgtttggtagaaaaaaataatgcagagtattttttttatcaagtgtttggttcattgcttttgacctcatcttgtgtttggattaaaactctacaaaaagcttctttccagttatacccttgcattattatgagattttctattttatgtaatcgatcaaggtggataattgccgggacaatattattatttattgaccttctagctagctaggagaaacaactttgttgtcatgtttgtgattttctcacttaaattattcgagggtaaataattattatcttaataaattaatcacttaaaaacgttaattttcaatttagaatagatagaccatctacttttaaaagacggtaaacaatagtaaaattgaataaatcttctacatttacacataaaaattgcaagttgtagttttaatatgtatgcaatttatagattgttcaaaatataaataattagaaaccgcatataaatcaacaaataatatattgaattaagatcacaaacgtcatgtggtgatatatttgccttttcaattagtaaatgttaaagaactaacattttaaatattgtattgatatgtattgtatttatttattaacaatcaactctctctaaataataaaatttgtaagttaatttaattaaataaattttctagaaataaaatgatttgagggatatttttgtctttacatatataattccatggtaaatccaatgtattactaataccaccaaatgaaaggtatttgtaatacatcctataataccatgtagggggttatatttaggcccaaaaattctacaaaacatagtactaaataatactatatataatacatggactatttttagtgttatgtttgcaaggtttctaaaattttagtatcataccctttttgaacatttctgaaatgcaacctcaaatttgacaaagttctggcaggttaagatagatgtcgtttggatgttcaaagtgggtaaagttcaatgaacccaaatgtagtgactttgtatgtttatggccactagcaaaagggattctgtcctcttgtaacatgctaagatgtcagtaattttaagctaatactaatatgtattgtcatcatgcttccctttctcctccaatagttgtttctaatgcataccttgtaaaaataatctgaag

SEQ ID NO: 1008 - DNA, 84 bp, Solanum tuberosum
  source 1..84: mol_type = genomic DNA
ggttagtaagaacaaacctcttgcaatttcagctttattcattgtgttgctctttaatggatattcaaacacttgtttcattag

SEQ ID NO: 1009 - DNA, 82 bp, Solanum tuberosum
  source 1..82: mol_type = genomic DNA
ggtaagcagaagagaagaaatactggttctctactgtttaatattagccagtcactaatttcatttgttaattttcaaccag

SEQ ID NO: 1010 - DNA, 84 bp, Solanum tuberosum
  source 1..84: mol_type = genomic DNA
ggttagtaataacaaaacacttacaatttcagctttattcattgtgttgctctttagtggatattcaaacacttgtttctttag

SEQ ID NO: 1011 - DNA, 75 bp, Solanum tuberosum
  source 1..75: mol_type = genomic DNA
ggtaagcagaagaagaaatactggttctctactgtttaattttagccagtcacttgtttgtaatttttcaaccag

SEQ ID NO: 1012 - DNA, 458 bp, Solanum tuberosum
  source 1..458: mol_type = genomic DNA
ggtgagcattttccttccgttatttttactagctcaactaatctggattcacactgtaaaaaccccccaccatggagggtcttacccgacctaccatagagggacatttccttcatttgtttgggtttaataacctagttcccaaaatccactagcttgactaatttggattcatgccatagaaatcccagtatatggggttttgcccaccctaccaaagtgaagcattttccttcatttttttggtttaaccacctggttcccgaaacctacactagcttgatcaatttggattcagatcgtagaaatccattatgggctttttttgggatcctaccaaagaggggcattttccttcattgttatacatgtgtgcttgattttcaactgattgagttatttatctttatgttgataatgatgataattaacatatttatcattgtttggatttgtag

SEQ ID NO: 1013 - DNA, 176 bp, Solanum tuberosum
  source 1..176: mol_type = genomic DNA
ggtaagatatatttactgttctttgtttcgaatgttaattttcctttcatgttgctatgttttcttcctctatcgtttttccccttttcataatgatttgctgcacttcagtgaaaggggtccttcgggatgtaaatagtgaattgtagtcaaatatgattcatgttttcttgcag

SEQ ID NO: 1014 - DNA, 86 bp, Solanum tuberosum
  source 1..86: mol_type = genomic DNA
ggtaacaaatttgctttccaaatgtcgtcgtttttaatctgctttgtgaattcaatttgatgttgtatatcttttctttcttgcag

SEQ ID NO: 1015 - DNA, 755 bp, Solanum tuberosum
  source 1..755: mol_type = genomic DNA
ggtgagaatgatgtttttattttacgtgtttatgttcatgtcatgatgtttttattttgaagcatgccttttttcattaatttgatattcgctttggggttcgattaatcaaaatttgtaacaaaatccactttgggataaatgttcctccagtttcgacctctctggttaaggatgatagatacttagtagaagcatgtatatgaactatatataggaaatgtgaatagaatcggtcctttgaattaaattgttgaaatgacgatgaatttaatcttcatttcacaagaattttctagttttacatgttcattttcttgtaattgtattagattttcggttatatatagcaaaaaaaaaattgttttggaattcaaattgaacttgtaagttgtatagtagtgttaacctgtataaagttgatttctcgtatagtcaatcaacttatagtcgttacgttttatagttatgattttctaaaatcactttctttgttctagaaaatcagaataaaaaagaagcataactttctgagataaatgaattagtgttcctagaacatcttttcttgaaaacaagtgactttcttacttatgatctcaagaacggttatataaaatctatcaaaacaaaatgagtttggaatggggtagggagtgggggttcgaggatggcaaggacgagatagaaaaattggaaaatgttttcattagccttgtttttcagttgttgataactttttacttgtttgaaag

SEQ ID NO: 1016 - DNA, 889 bp, Solanum tuberosum
  source 1..889: mol_type = genomic DNA
ggttttgttcatttctaatcgaattttcatttcgtttatgaatgtgcctgttgcctttagtttctgtttttcgttttcattgcgaattgcttacttattattccgattggtagttaacagtgcatacattagatccctttcttattgtcattccaaatcctatgctaattgacccgatgtatgagtttatagttgacagtgcctttagaagtgcctatactagatctcttcctcattttcattccaaatcctatgctaattggtccgatgtatgtgcttatagttgacatagcctagatgtaaccgaatttgatcttgttttgatgcttgtttgttgtttctatgaatgtacgtacggtagcatagtcggttgtatacagatctcttttactcatgtgtaatcgtatgatctataatgcaaatgcctatatttgctgttaacaactcaaggtagaaataatgctgatgcgtatgtgcacatttgaatgttcatataaagcttgaatctcatagagcacacaaatgattggcataaaattgtatagtctagcagaaggataaatttaactttctcattatgcatctcacaacaagtcatactctcttagagttcatgatcgagtactgagatttatgatgtgtctggatcttactgatggcaatattagtcaatcgtcttgttttccttttccttccagttttggaaatttatctaagatcttatacacactgcttctttcttgaaaatttctggacaagtgatagtatctattgaataatctttatatgtttgatgcatcaatttggtgatcctatttctacaattattaccatttattgattgaggggtggtagttgactgatttatattctttattgtgtggatcag

SEQ ID NO: 1017 - DNA, 88 bp, Solanum tuberosum
  source 1..88: mol_type = genomic DNA
tgtaagtgtttctctttagtggtaaccaataatatgatctgcaagtttaagtaagcaaatgattaattttgcctattttctcttgtag

SEQ ID NO: 1018 - DNA, 83 bp, Solanum tuberosum
  source 1..83: mol_type = genomic DNA
ggtatgcgttgaatcattggttcttttatctgctcaccaactgtttgatgaaattccttaatgatgtttatttatgttttcag

SEQ ID NO: 1019 - DNA, 5443 bp, Solanum tuberosum
  source 1..5443: mol_type = genomic DNA
ggttagtagcttatgtgtttgaaagttccgctagtatacatttccacataatactttggttgcagggcaccttaaccaacagaaataaccttataagttaatagcttttccaagtaatttggatcttttaatatgtaaggggttacaagaaggagctgttttgtgttaaagatgataaaaaatggattttatttgtacattaggagcactaatttacacattatttatgactggccttgcttcatctgtaaaagagtaacatatgcagctgtgtctgctttattaccaaaagttcattatgtttctgaaatttagacttatttttgcttagctaaagagtagcttgataacatagtaagtgcaccagagcaggaaactctctttctttcttaggggagattggttttatggccaatgacaaatgttcttttacttatattgtcattttcataggagattggtaaataaaacacgagatctttgtaggtagtgtcattttcttctattcaaattgtaattggtcatagacttgtaggaattcgtttcctcctttattagtcataacaattgttgtcttgtaggtgacaatttgctttgaccagttaaataaaaataagagcacgagttgatataatatggaatatagtatggcagctcttatttgcactttatccgggaaatgatacaatcagtagtccattggtaggctgatctatgcttacttacaacattattaattgattatgatacggaatgttatagattctgacttaagtcgtcttttaccgaatatctctacctctgttgtgggatgaagtttagcagccaggatagatggttatctcttactttcagtatgagtgtttgcattttgttaatgtcttttagtgcaagtacaattagagtgggtaagatagagctcgtcaaacatgccaaggtcctactcatctgtgagggttgtgccaatgctctaaaatgcagatgaaacttacttatatttatgataataaccttagagtgcaccatgttcattttattttgcttttttctggcattctacccatttaacttattttcatggaatttagatcattcgcctttggataactaagtgttatgcctgctataaatgttccttaggaagattgggcaagaactgtaaaagcaagttgtatattctatttatatggataccataaactgtatgaaaacaattaaaaaccaaagaatcaagacatgaggaagggataacaaaagaactagaaaagaagaagaaagaaatggagagttaagagtttctggtcagcacaatcttggtgctgtttaattaataaattttgcctttctgacaaaagtattactgagcaatgcttgccggcaggaagtgacctatcgagccttagggaaaattgagtaacagaagaaaaagaactaaagcaaagtaaactaaaaaaagaagataaaaagggtagattaatgggttggggaaatggagagggggagaagcaagatagaaggggaaaattcaggatatatttctggtaagatgactaatgccaagatataaaccctggtcaatcaagttcaaggaaaaggtgaaggtagtgaaagagttcaactatcttttattagggatgttgttggttcggttcatccggtttgttcaagaaatttataccatatcattttcggttactctattgtgtattactaaagttagacttttcgaaaatgtgccaatcatctcaatttctctttgatatcgatacgattcggtttattttcagtatttattttcaaaacatcaagtaaaagttaccttatcaaaaacaaaacgtcaagaaagagtcagtgttattaggttgtctcatttgttatgtaaaataataacaagctttaatgttgagtacaagagctttgtacatatgcaatgcccttgtaagtttttgatatacaggacaaagattataataatgcaacatgtgcactcccaatacactctttacctaaacaaaatattgctccaccttaaaacaaaattattgagttgctaactgaaagtttgtagttcaaaagacataaaatctgaaaaaataacatgtaccattacttaagactttctggaaaagaaatattgacttgatatttgattcaaaattcacaaaaaaagaggagggggggaaaacataccttggtggcttgcttctttttttgatgaagtgagatttcattaagccatccagtagatgcaaagatacaaaaggggggatctgtcagctcagtaagaacaaaaaaccttatatagctaaggagccgacaaaatctaggtagtgatctaagtaaatacaggggagaagttggcccaactaaaaaggttaaccaaacaactagccttaagcttacaaattgaagttaaaactgcatcgaaatatctcctgtttctttcattccaaataacccaaaaaatacaagctggggtcatgatccagattttcctgatggattttctaacttccatagagctccaactagtgtaggcatctctgatattgaagggcatggaccaacttataccaaaaagcgctaggaacatgttccaaaagtgtgttgcaaaagggcagtgaagcatgaggtggttgatgctttctgaagttaactgacacatgtaacacctattgaccagttgaattttcttctcataagattgtcttgagtgaggcatgcttcttttaaggctgtccaagtaaaacacgagacttaagggggaagtttagtcttccagactaacttccagggccatagatcaatcatcattttattggggctcgagtgttcatatcctgccttgactgtgtataaacctttgctgttgaagttccattttaacttatcactgcgctgaatgttaatgttgcagttctataagcttttgagcagattcaataactctttaaattcccaatcttgcaaatttcttcttaggttcaggttccaagagttgtcatccctatactgagcaatacaataattaggatgtctggcgatgttaaatatatttgggaaggctagtggagtctcctgtccatttgtctagccagaatctgatatggttcccattccctgatatatttggtggcttccttttaaagattgccagattcaaaatcaacaatgacaaccctaatgtgatcccattagtgaggtctggggaggatagagtgtacgtagaccttagccctaccttgtgtgaggcaaagaggttgtttacgatagaccttcggctcaagaaaattgcttttaaaataggcatgaaaaatacaagagtgaaaaacgctctaatgaaaatacttagaaaagagaagtattgacaagaaaagtactaagattgtcagaatcctttaattttaataggggaaaagggttaaaaatgcccttaacgtatctcaaatggttcaaaaaatgccctccttccatctttggtttaaaaatgccctcaacgttttcttaaggtttaaaattgtcctttattaacagcccactaacataataaatgatgactcatttaattagccaagtgactttatcttattggtccacctaatttttaaaatccagcccaacgacccgacccatctgtgctacaaaacttaaacccacccaaaacccattttcatattaacctatcttatctttgagctccattttaggacgactctcaaccccttttgtagcatccgacgatggcgattgagggttgcaaatcacaacacctctagttatgttcttcagtataatactttttgtttcttctaattttttactacagttgattccattactctgcaacttaggtaatgttttgcttttttaggagtttgattaggagtttgtgaaagtgggtttacagcagaatcttgatattgatcagtttcagctttatgttggaataatgagatgtttttgcttgagaattgttgaaattcaggtcaattattgacttttaatgagcttttctgctctgggtcgatttgctcctaagctttcaaggcattttctgaagatatgtagggggattctattaaagatgtctgtaaattgcaaattgttgggcacgaattagagcttctcttcaagttttaggctgaagaaggccagagagtctttgctaggaccaaattgtgggtggagatggcaaatgaagcttttgtttttatggctcattttcttgggaattggattttttggttggtcattagcttgaatggtggtgtttatagttggaagcaggaggcttcagaaccaaaggaagataaatcttattttcttcttgaaagtttcaatgtcagcaagtaacaaattcaagatttagctaaccttattctttgtagttcttccttccttttcttcttgaaattaactgagaaatggaaaaagaagacgaactgaaggaggtaggaagaaagaagagagttagaacaaacgggaacaaaagatccaaaattaattggtcatatcgggtcaaatttgaaatggatttctagactaagtgggtcatatattttgaaatagataaagaaaatccatgtcacaattgccatgtcattgtgctgttaataaaaggcaattttaaaccttaaaaaacgttgagggcatttttaaaccaaaaggtggaaggagggcatttttgaaccatttgagatacgttaagggcatttttaacccttttcccttttaatagtagtagagtatgtttgggtgttacttgtagcaatttcaatccgcatccatccctaggaccaaggcaaaaattataatatttcattataaatttaatatacaaagtaaaaaaacctactccaatcattcggtacggttatagatttatatcgaaacctgtggttttaaactaataatcagtttggtaaggtttggttctgttggtttacagagaagcattgatacccctatctttataataaaaggatctggttatgtggtcgaaatcattactttttcaatgagatgttatcgtgtttaagccaaaaatgctacatatattaggatgtggaaagatttcccataatatcataaccagaaacgagttttgcaatagccatcacccaattcttaagggccaccgtcaatattagcattataatttataacatgctaggaacctgaaatgaatactataaaggccctagcaagttcgtatcacatcttcagttagaccctagatgttcctttttcgctttttcttgagctatgaagagaaactgctaagtttttggtcacattctgttgttggtacatccagtatccattacttacttctttaatacgtatgtatttattttttgtctacttcttgactggccttctattagatctgcataaaatttcttgatatattaagcagatatttgttgtcctttttttttag

SEQ ID NO: 1020 - DNA, 1007 bp, Solanum tuberosum
  source 1..1007: mol_type = genomic DNA
ggtatgtacggcatctctcagaattggttgaaagaaaaaaatgtgttgtttctcttcattcaactcctcgcctaaaaataataataataataaaaaaaaaaaaaactcctcgcctaatttgtttcctatctagtagacaaatagaacttgttaaatatagaatcaagtgggacaaatgaaatagaattctgatatcctgacatttggtgtttccttgttatgacttgtgataaaataaattggagttcaaagaggatccaagatatttaaaaaacaagattattttattaaaaaaaaagatatggaaactatgtagtaattgcaacctctagaaatgactacactcataaactgtagaagggggaaatatattccttagtgtgcaagctcctctagttgtagtgattatggtgcgagtcgcaatacctaggttcaatattttgttcataacatgatgatatctcacttatttcatcaaaaagaagatatgttattatgtgtggacaggatagctgttctttgtttatttcctctttgcatacagattcttggtaacggatcagagcattctttgcctgaaaaatataactgaggccttacagcatttttcttttttgcaagtggaaaatttaagtttgggagagtgccttgttacttgttgtagcaagcatcatcttggaaaaattgttaaaaagaacatcctttgtcagcagttcccaattaattctctatcgctaaacctacaaggctacaacatattttcactaattgcagtaccactacattggttgatttacgctatgcatctgtttttatttctttagagttttgattccaaaatcgggtttgtctagtgtttcctcatgtgcttcactccaaattgacttttcgggtaccagcgcacagacatgttttgaggtctcagtttgaactttgaaattttgaaaaggtgcgtgttagcaagtcatctcttaaatgttcaatctaatctatttgattcaatgtag

SEQ ID NO: 1021 - DNA, 417 bp, Solanum tuberosum
  source 1..417: mol_type = genomic DNA
ggtatgatttggttgtaacattgtctaatatacagctagtggaaaggggaaaaagaaccttgattaagaggaaaaataaaagtttgaagttccttgtgataatgcctaccctgcatgttgttcttccatcctactcttgagttgaagaatctgttctacgctaagttgctcggactctccaaaaatgttgccgcacccgtgtcgaatcctccaaaaatgcactacttttgaaggatccgacactcacctggggacatttttgaagagttcgagcaacataggttctacgttcctgagaatgagagcaactaattatgtcaagatttaagctgcttatcatcctcttcttacatctgagaatgaaattagcaactgaggatcacttgtgatttattttgttgctgcaaatgatttcag

SEQ ID NO: 1022 - DNA, 346 bp, Solanum tuberosum
  source 1..346: mol_type = genomic DNA
ggtgtgctctgtgtttcaagtctctgataatttcaagctcccaaggtcttcttgcagcttgttttaagctgaaaaatcatgtagttgtagacattgccccaattatttacagttgtacgcctcatatactgctggtttgctgcatggcagagtgaactctaaaggtcttataatcaacatacaaaggcaacctgatgctagatcccgttatggacagggtccagggaagggctggaccacataatcaacatagttatagctaaataagaaaacaaagcttgtagaggtgatgcattatcgctaggttgggtgaacacctttctgatttaagaactggtttttgcag

SEQ ID NO: 1023 - DNA, 178 bp, Solanum tuberosum
  source 1..178: mol_type = genomic DNA
ggtaaagttattgttgattaaatatataagatttccgttaatcaagtgatccagcaatgtgtaaccagtagaaaagtctcccttatatggttgagttaaaagtcatgatcttgatatcacgctctttgaaataattctttgaatgtgtatgtgatattatgcccttgtaaaatactag

SEQ ID NO: 1024 - DNA, 102 bp, Solanum tuberosum
  source 1..102: mol_type = genomic DNA
agtaagcatttattctttaatttttatctgaattaattgatgaatgaatctttggtctctggtacctaaagatgctcgcctactgaaaacatattcactcag

SEQ ID NO: 1025 - DNA, 115 bp, Solanum tuberosum
  source 1..115: mol_type = genomic DNA
agtaagttaattattcgatttctgttaccttaggttttataactgcaactgaagttactctttgtaaatggctggtcagcgaagtctgacctatttagttgtttccttatatcag

SEQ ID NO: 1026 - DNA, 95 bp, Solanum tuberosum
  source 1..95: mol_type = genomic DNA
gtttgttgctcatttctttttgggtttgttgttatggatctgcgtttttttggattatgtataatgtgttttcattgtggtttttggtttttagg

SEQ ID NO: 1027 - DNA, 104 bp, Solanum tuberosum
  source 1..104: mol_type = genomic DNA
gtaagatcctttaagcgttttgatttgttcgtttctgctttatagttgttgttcattacttgttgaaggtatttatgttttttcgtattgtttgatggaacagt

SEQ ID NO: 1028 - DNA, 3162 bp, Solanum tuberosum
  source 1..3162: mol_type = genomic DNA
ggtactattttcattcttcacaattttgtgctgttgttttcataaattagggttttgcatcttgttatgtgtgtggagattgatatgatacgtataattgctcaacgtgtttgtgtttgtcaattcgtgatctcaatagttgattttgttctatatgtactaactttggtggacatagttaggcactgatacttgttgcgggtgtgaggtgacaggtatcacgtctcaatggcttgttttgggttaaaagggatgtgggtgggtgggtttaatttggttttacttaatttagatggattttttgcttttttcactgatttaattaatgatgtggacgcatcatagttggcctcaagtacaaagcatatgttaaaaccagatatgttttccgttaaaaaatactggcattaatgacatttatttaatacactagttttccggatatacactagctgatttcgtctcatccatcctagatttggtggacagagtcacctaatacatgttgtgcgagtgagtgttgtgggagtgaggcaggtattccgttggaattagtcattaaaaatttttatctagttgcaccaactctaaacacttgctgattttgtaccatctgttgtagatttggtggacatatttacctgatacatgttgagggtttgaggtgacaggtatctcgttggaattagtcatataaaaaaatatagttgcaccggctctaagcactagctgatttagtctcatttatcctagatgtggtggacaaggttaccttatacatgtagtgggagtaacattgaaattgatggagtatttcatatacttaagtatgtttccaataaaacaagatactttcaaaccctttttggtaatacatagccccttggactaactttttgtgggtgaaggatgtatcataacctttatctatgtcttatttttacgaaaaagggtaaaagatgtcctaaaactatgtgaaattgaacaaaaatgtcatcgattaatagtttggtcctaaaatgcccttgccatctgtatgaagtttgaacaaaacctctttcatcctattgggaaaaatattttgtattatatcaggaaaaagaatgacccggggttctcacgggctgagtcttcgtggaagttatggattcggtaaaatttagtaactttagctcaaactttatatgtgtgttaaatatttcttttgatatagataaataatcttcttttttttttttgataaaagtaacaggataaataatctattcaaaattcagaaagtaaaaataatttttgtaattctgaattcataaattaaaaaatctaactccggcaatgaggaacctattttaatttagaagagacccaaattttttattacagaaacctgagttttaaatgacacatttgtttgtagtactttgtaaaacaataaagatactaaactatataattgaaaaagatttatatagttgcacccggctctaagtctagtgaaggaaagtggtagtcatgataattaaaagatgctaattagttttgtttttttgagaagcaaaaatgctattttgttaatgttacatgttatttttattttgcaagtgttgatctttccattgcctgctgatggaaactgaatttgttcctcataagctttattccattagatacggatggtctgtcaaatacagtaccagaaagcttgtcttttggagcctcaatagatacaggcttttattggcacatacaatgcacttagtctggattgtccttgttgtgcataaatgggatatgcacttcaaattgatgtccaacttatgaatgataaactctctaaagctacctgcatcacctttaactcacttttgtcttttcttttgaaaaaaaaagaactttcctatgcctctttacaggtggttaaatatattgaattatacgaatgtcctgaatgtaaacacaccagatttttttatttttttttgataaccgagaaatccgtatgtgacccgccctttggaccaatcacagccttctaaactcggtggataatgggcccgcccctctacccttctccacttaaataccaggctttgctttgcatggtgtgggtcttgaacctgcgacctaagtcacaaatcctccaccttttgccacttgagctaggccttggaggcaaacacaccagattttgattgcatactttcagcaatatttgatagaaaacagacagaagcatgcaatgatgtgttagcaccagaatgtagtcttgtgtgtgattgatggtagcttaagtttaactattctactgtttgttcttctctttttgataaatatttgttctggagcatttatcaccttggatggtccacgttaagtccctgtttcactttcgaaggttatcttcacttcttgctggccctttctaatcttcctcgagatgttattggagtgaatgtacatcatgtgaagacgattgatggtgctatcacactctttatgatatcccttaggccactgttacaagatattcacctgtttggagcttgttttgaagctttttatcttgtttagacactaggtatagtgaaccccttgtcaagtaggtcccaaattttctctttcagttcttttagtttggatggagcctttcattacggaaggaaatgggtaaagtctgtcccagatgctagagatctatgctccctaaaccatgggttttcctatttctgaggctagaggaactcgatcaaatacagctcaggcctatgctaaggtttttacttcctaactagtttatttgaagtcaaccttaatattgtaagatatgcattgccaaaatatgaccaacccacgaaatgtaagagcccgccataacacacaaggaaaacctcataatactgtcaaagctatggtctttgaattacaactgtacatacattaacttctaattgcctaaaatatgtgatttgctgcatgttgtatggtcaagtgttgccttctgttcagtttcccccccttcttctgctatctctgcactgacctatcctgggtttgtccacttctcttctgtagtatttgttaactgttggcgttagtgctaacatgtaacagtcaatcttctgttcttctcatttcacgtagagctgatgtgttgcttaccag

SEQ ID NO: 1029 - DNA, 1543 bp, Solanum tuberosum
  source 1..1543: mol_type = genomic DNA
ggtttgtatttcctttatttcattcaaattgcatacactagatttgtggttttcagtgtttgtgttttctcctctttcccatgccatactgcttcctctcccccacactatgagaccaaaagatcagtgatgttgtatgtgtgatgctgtgtgcctggcttatgaatcttctttggaattccctttaaatctgtgcaggttgtcatgtttctgttccctggtatttctagcattcccgtaataactgtacttttttaggacttaaaatgtcttctattattcaatgctctactatacccgattccataattgtaatcatccgtggaccatactgtgacaattgaatgtctcatatgatttgcttaaatgcagtgtattttaaggatagagggaatgtgaaatcctcatgtgcattttggggcataccctaggttttggatcatacaattgaacttttgtgtggcttacttgacagcataaaattaaagacttaatgacttgaaatatgtcaggtagttctaaaaaaaactagtagtgctgtaagcttaagagcgttgtaaatagtgggcgggtctaacaggtcttgcatctgcaattctgcttaatacattgtctagaaaaatcagcaggtcttacagatcttgtaatctgcatctgctctcattagccaaattttatcagcctaatttcatacctgcctgctagcattgccagaaaaatggtgggcatcctggtgtttgtttttctaagtttggtgtaaaattttattattatttttttggataattatgaaattcttggggtggttaatgattcgaaactctatcaacaatgttctgcccctctgcccttcttaaacacaaggtttttgtcttcagcagaattcgaacccaagatgtgcaccttaccaacatacccacatcacatattgcactcttaccactagaccgaagccctggagacattcaattctatctctccttttgagagatatttcgcttagtcttggcttcgtaaaaggattttcttgcaagtagacagatataacgaacatgcagtttgttataataatttggacaagtttgcttcttcccttccttatcagtgacagtgaatgccaaaaaaacagaactatatgagtgctcagtctgtttgtgtttgtatctcatccgattgagataatagaaaatatgaaaacattatatttctcttcattaaccattttgacagacttttttgttgtctgtcatgatcattatattactatagcacatcaggatatggcttttactggaataccatttcttagtttatggaaatccatggtgtactaattgagatgttgtaggatatcaccttcatcttatgggcagaaggtgaacagtggctcggagatattgaacttgttgatatatctatttttgtgaactacctacccagtttatctttaccctatgtgatagaagttgtgttcatagtttgttatttgtttttggcagtttgagacagtggatttacactttgtacttttggtttaatgcag

SEQ ID NO: 1030 - DNA, 477 bp, Solanum tuberosum
  source 1..477: mol_type = genomic DNA
gtaatttggctgttgcttttcgtttagtgctttttgattctataacagaatttattttgtaacatgtgattactcggacggtgatcgggctgtgtatgtacttgtgcacgatagcaaagtcaggaatttcgctaagagtgttcaagttttttttcatatactttgtattttttttatacgaccggtataatttttcaaagaaggatgtttaactgatcatccggtgcgtgtggtatgtatgtccaacttagcaagaaatcatgtttacgtcgtaataacaatgcaattttaaatttagatgtttgaagactgatgtattcattccctgtttgaacaaatttttgttaggcttataagagagaaatgaagtttgcgtttgctataattttgttgattatgtgcagtaaatggcttgaattcaagtaaattgtctattttgtaaagcttatgaatgtggactctgttttaaatttcagg

SEQ ID NO: 1031 - DNA, 242 bp, Solanum tuberosum
  source 1..242: mol_type = genomic DNA
gtaagatgtcttttttgatcagcaatagttttttttttggtgaaactttacagttttgatgttttggttcttgtatgtcatgtactccctgtagttattaaatttacgctgtatctatgcttgtcttgtgtctgattctttctatcctggtattgagattctgttggatttaccctttttatatgattgtattatgctagtatatgtagattaatgtactaactcgtgatgtttgcctcagt

SEQ ID NO: 1032 - DNA, 478 bp, Solanum tuberosum
  source 1..478: mol_type = genomic DNA
ggtaatgcttattaattttcactttactttcatatttccaatgactttgaatatttgttgtgtcattgttatcattctgtggatatcaaagttcatgccattccgaattaagtgacaaactctgtggatgtcaaacttcatgggctgcaccttatggggtctgtttgctcttattttacttaaataactagttcaaaaggatgggggcattaactcaggatgggtcgtgtactggactacccttaattagttcaaaggggtttctaattatttgaagtcaattatatgttttggcccctctgaaacaaatgtagaattaggatccttcaatgccatgacgtttgaaccattttctaaacctaaaacaacttaaaacttagattaagccagcagaaaatccacattaaagtaagatgatctttgagtgccaaacatgctgggatctcccttattcataactactgcattaatctcccag

SEQ ID NO: 1033 - DNA, 73 bp, Solanum tuberosum
  source 1..73: mol_type = genomic DNA
tgtactttttccaagcccttataaatagcttatcatcctcttttcttttattctaatttatttgtatgaacag

SEQ ID NO: 1034 - DNA, 186 bp, Solanum tuberosum
  source 1..186: mol_type = genomic DNA
ggtccgtatcacagtgtatctttgacttttatttcagttttgtgttcaattgaagaatctgcttcaattattcagcattttttcccttccatgtgaattagagtgtctggaagtgtagctctatgaatttgtttattcctaagtatgaatttggttgtcagcatctcagttattggtggcttacag

SEQ ID NO: 1035 - DNA, 104 bp, Solanum tuberosum
  source 1..104: mol_type = genomic DNA
ggtagtgcagaagcctcggtgcatctcaaaagcttatctactaatattggtttatgcttatcttcctttttctaatgtcaatgtattgaatttggacgaggaag

SEQ ID NO: 1036 - DNA, 85 bp, Solanum tuberosum
  source 1..85: mol_type = genomic DNA
tgtaagatgcagcctttattgcccattgcttacgaaaagccggatgttctatttgcttatgtattgaaaattcatctcaatgcag

SEQ ID NO: 1037 - DNA, 77 bp, Solanum tuberosum
  source 1..77: mol_type = genomic DNA
agtaatatactgtccttttggaggaactgttcaaagtgtttgtacttctctaacatgtcttttgttactgtttgcag

SEQ ID NO: 1038 - DNA, 1475 bp, Solanum tuberosum
  source 1..1475: mol_type = genomic DNA
ggtatataacttattcgctttgttatgttcagtgtgcgtgtatgcaagtagtatacagcgtctataccaaatattaggttttgacttgcgtgttgtgctttaccttagattgtctttttttcagtatttggttgggtatacaaatctgtacaaacataattgtaggaggagaaatatatgaataggatagtgctcttggcgaaatttttaaaaattaaatgttgacaattgtgtagaactgttggttgaatgaagtgatatgaaacaagagttttgtttgcaaaagaaaatgatttttgcacataggttagtgagcaaagccattttcactgtttcgtgagaagtaattcccttgaacaaaacattttctataatccaactaaccaaacacataatttcaaaacattttcctggaaccaaacgcgccctaatagtgttctgctgttcaagttcccgtcgttcttatgattttacctgtttaggtatatgcttgtctgaatcgtaccttttttcgtcacattttggaaggaaaaaacataggtagcatttaagtaggggttttgtaggttcagcgtctcttttttatttttttgtttattttgaaattaaagctttttatgacaactttgttttacaattgatttattggtttaaattgagatagttttctgtcgttcatttactccgtaaggaaaatgtttttttttttttctcgctgtggtggaaaatgaaatgcgaatctaagagaaaaagggctaacattaaagtactattttaaatgcagagatacttaggtttgtctcttttgtgttcagcataaaatgcaagtggtgatagatacaagtgacaactcagataaggattattggttagatcatgtagtagttagtgagacagtttagtcaagttattctatgacaattaaatttagtgactttgaaatctacatgggaagctaaatatccctccgaattgcataccaaagaagcatcacgttgtttaagtaaaacatctgtctgttatcacgatgagtctttttaatccaaattatggtgcttgttggttacaccacaacactacatgttttacttttgaaaagttatgtggttttgcttggaatttgttgtgttgaacttatcatcagttgatagatgtgctgtttctaagaaaataattttagggagcttgaagcttgattgtctgcaaattatagattcgattctttcattttctgatctgatttatgctacctagtggcgatggatgtttacacatgtacatacaacactatcattgagccacatgcttgtgaatggttgatgtacaggtcctcatccacataggcaacaagttcttatttgtttttactcacttgcttgtgtgattaagtgcttgtattttcatcttaagaccactctcttatacaacatgaataacctacattactttattgtgatgaatatttaatgctgcag

SEQ ID NO: 1039 - DNA, 571 bp, Solanum tuberosum
  source 1..571: mol_type = genomic DNA
ggtctatttgttttcttttaaatctttgtatcagttaggtactttggtaaagctgagtacttttctaaacatgggggtattaatagaaaatgatcaatcatgtgtaggaacaaaccaatgccataaatatcctcagctagtttctggactaccatttattaagatttctatattcccaaagatgctccaccaatgttacaggcaatactttcactctcagtgttattttagtggcttggatgtcaatttggacgaaggagccaagctcataataactgtgacttatcctgacttctgaaagaatatatccactctttgaccgccgttacagttttgattcgagatactttgactgagttgagaaaaccagtagatgtcatcaacttcttcatcaatccacttccaatactattctgtatgctttttctgtgatgttcactcgacttgcacctttgtagagtctttattcagaaaacaatcttgaagtgcttcatggacctttcattttgttgtcccgagagcttgaattagtagtttctgaataatttggtaaaaccattttttctaccag

SEQ ID NO: 1040 - DNA, 107 bp, Solanum tuberosum
  source 1..107: mol_type = genomic DNA
ggttgactccttttatttagttggttcagattgtgataacttcagtagattgggtgagaattttgtgtggatatttattatgttgctgatcactgtctttagtgcag

SEQ ID NO: 1041 - DNA, 965 bp, Solanum tuberosum
  source 1..965: mol_type = genomic DNA
agtaagatatctgttcttatctgtcagtgtttttttgtaatgttctaaatgtaactgtaatggtgattgctgattattatctttttacttctgctctctcatagtagctcaattgtctcacaattatttaaacaacttaagtgcacgaaaaagaaactagcgatatcaggttgctttgcacatgtacaaaatcattattgacccgttcaaaatctatcctattcctctctctccacaccacccacataagagcccatagggcggtatcctatcctttggtattctctttctttgtttgaaagcacaactatgaatgcatcctttactattcatagtccactgtatcctaaaccaattctgaacattcccatatagtactagctgacatatgtaattcttctcttttctcaaattctcagctgacaattttgctccatgagattgttttatagttatttttatttgctatagtgggacctgatattaagattaatatcactttgttttattgttttttctgatttcaatatcttgtcattgtctttggcatcttgtaatttgaaccatctaaattgtgtgcttgtggatatcaagatacttaagcagtaagcttttgatttattgggggatgggaaaacaaaacattgcctgattcacgtgtttcccatgaaaaaaacagatctaaaaatatataattctaattaatgcagagcaatttatcttggtgtaactgattttgtgaagtcacttttttcccactattatacctatcaagaaaaagagaagatgataaattggccatctcacaaataggtagttatttcttcttaattccactagctcattctctattcatctattcttttcgcttttctgtttcctagtaaaattgtatcatgcagcttgtgtgtggggcattcagtagtgacaactgaagcatattgctaataatcttctttttgcag

SEQ ID NO: 1042 - DNA, 74 bp, Solanum tuberosum
  source 1..74: mol_type = genomic DNA
ggtctgtaaacctgctctctatattttcctattgaaagcttttgcagatatactcatggactttcactttgcag

SEQ ID NO: 1043 - DNA, 504 bp, Solanum tuberosum
  source 1..504: mol_type = genomic DNA
ggtattcatgattattgtttaacaacttttacggtgtaactccttttctttcttcactcgtgctatagaaaggtctgattgtttgaactttgaaatttgattgaaatttctttcgaactggaatgattctaagcagattctaattctggctgtttggaaaaggcacaccacatgagccatgtttttggaacttcaacaataaacttggttttatgttgttatcatgtaatccttaacttgcattatttcccttgagaagtttcaagattatttcagttgcaactaagacatagctttatcacccaaccacccaaagggacattgtttttccattttatacatcaagattcctttgtagtcatgaatcttggggatctagaattatattatattgctcatctgttagccgtttcccaactttgtaagctcagagcgtatatcaagacaacatatgcatacacaaagcctcactacttcttactcatttgatgtttcgtgaatcag

SEQ ID NO: 1044 - DNA, 82 bp, Solanum tuberosum
  source 1..82: mol_type = genomic DNA
ggcaggtcttttggccataataaattttgagatttagcttttcttatcctacttcttgactttgcattaccttcctttgcag

SEQ ID NO: 1045 - DNA, 615 bp, Solanum tuberosum
  source 1..615: mol_type = genomic DNA
ggtaagatatacttctattgtctacttgttcaatcttttgtgctgaaggctgttaatctgagttgtacagcttatgaactgcttaagtgactttcttagagattaaggatgtatagtaatgtaaaagtcaaagcttgttgtccgttaattcagcttaccaacttgttacctttgtcaaaaaaaaaaaagttcatcttaccaacaaatcaagggagtaaaattgtacttgtaaagtaagtttgacaacatgaagtagttgtttgttctgtgtttctaaactgatgcttgatccattaggtgctgttgctgaatccgaaggttctacatagtttatagtttgagctttaataacagacctatagcataacttcttaaagttgaaaacataacagatattggtaacttatgtttgaaaaacgcatttcttgtaatgggcaaatatagtatatatttcagttgctgacatgataatcagctgaggcaagccagattagtttgactatctggtcttcacgttcagtcgtaaatcactttcctgaatgttgtttggaccttgtaaagctgtttgtttccttaaagatctgtaatattactgtatgttttccaatgtatcag

SEQ ID NO: 1046 - DNA, 1485 bp, Solanum tuberosum
  source 1..1485: mol_type = genomic DNA
cgtaagttctgtttcaactctgtctttctgatataatctactaagaataagaggcagcacagtgtatagtttagttattggtaagtcagtcctcattccgcccctggatttggttttgtatctagcttttctgcttgcatggctaagaaactgataagtaaaacagaatagacatttgttgtgctctgtggtttctgcaaaactgaacctgaatctgaaattttttcaagttaaatctgtcaacttctataggaaactatgacatgctttcttcctcagtactgtatttcctttccaaacctgctttgaattgttttacttgagccgacggtcttctggaaacatcctctttgccttcacaaagtaaggggtaaggtctgtgtacacaccaccctccccaaaccccacttgtgggattacattgggtatgttgttgtattgctctgtcactatacaacagtatctatgtctatagctgccgtccacatcttaagtaagattaattgatgaatttgtgcagctgatattctatatctaaccaattacataatcaaataatattgtttgtcattgtaagaatgtacggcctttagagaacaaaagagaacacttggatatatgaaatgtatttgatgatgcctactaacagaaagtcattgaaaaacctggattgacatgtttttatttattggcttagatttactttgtcattagataattttcctcaagtaatatatagagttgtatatgttacggagaaacaagtagctaaattcgaaaagtaatactcccttcgccccaatttatgtgacacttttttcttttcagttggtccgaaagaatgacatctttctatattttgtaacaatttaacttcagacttcccattttactattaatgaaatgttttatagccacaaaaacttctatggcttattctaaaccgcaagttcctaaagttttcattttttactttaactctgtctccagtcaaacaccttcacataaattgggatggagggagtataaggtttctgaagtacaatactcaaaagtgtgtcaaacacgttcacataaattgggatagaggggagtgagtataaggttttcttgagaatagaacagtgtcctttatgatattttgacttgtgggcatgaggtctaaagttggactttaaaaaccatgcttctgtgaggagttaaaatccttagctatccctataaaggctcaacaatttggagaaaagattgcatcagtatgtcaatatcacatatggatgtttgtcctatgtcccgtttgggcgttttagcccccagctgagcttcttgcttttcttgttcaacaaggaatgatctgtccatgcgggagtcgaagaaccctagctttaatctacatgcactttcctgtaaaagcttttgttggttcatttatagtgatgtttgctttaagctttttcctctttaatttttacgcataatgggcag

SEQ ID NO: 1047 - DNA, 96 bp, Solanum tuberosum
  source 1..96: mol_type = genomic DNA
ggtaagtgctactgtgctagtactactatactagctagtctgtgttgcctgttatttcatgttctgcatcacaaatgggctaatctatttgtgcag

SEQ ID NO: 1048 - DNA, 586 bp, Solanum tuberosum
  source 1..586: mol_type = genomic DNA
gtaatctaacctctcttcttcatcagatcttgctttatttacttgcttgtttgctttcaatttctgctttgagatctgctctagttccttatgttgaatcgctgccttttgttctcctgattactctactgctctaattagttagtaaaacttggatttaggtgtgatattccgtttgatttttccagatctgttgttttaatggtcaatctgtcatgaacttgatctgctctcaattttcctagatctactttatttttagtacttgctgttacatagtatctctgcatactcattttggttaccagaaaatttagctgaactttgacggatctattttttttggctgctatacggaaaaacgaagcctatttttatgatgataagtgtccaccgttgtattcatttaaccgagctccaaattgtctgggatttagaatttactaactaacaagtaacaagtaaagcggtatatgactagagacatttagttgagttccgaattaatcttctgatgttgttttatgtgttgataccttcatgtatatatttaggtcttactaagtgtgctgattttactttcagt

SEQ ID NO: 1049 - DNA, 116 bp, Solanum tuberosum
  source 1..116: mol_type = genomic DNA
gtagtccttgttcatagattattgtttttacaggaagcacttgtcatttataacatttcaatttaagcaaactgcatattcttttttatggaatgatttgtgttttgaaatgtagg

SEQ ID NO: 1050 - DNA, 89 bp, Solanum tuberosum
  source 1..89: mol_type = genomic DNA
gttcgtactagtctttacatgatccaactttgtctgtccaatgaaataactgtgatttaattttgacttaataaattacttttgacagg

SEQ ID NO: 1051 - DNA, 94 bp, Solanum tuberosum
  source 1..94: mol_type = genomic DNA
gtgagcttttgttcttctttgcgttaattttttttccagtacaaattacattagctagttagactgaatatgtgttactttgtgcttgatcaga

SEQ ID NO: 1052 - DNA, 1084 bp, Solanum tuberosum
  source 1..1084: mol_type = genomic DNA
ggtgagtgtatgaacaatcatatatgttcttcaattaattttacgtcttcttcattttattattactactcttctccagctcaaactcggctagtacatgtgatctgtgaaatatttgctttcaatttttcagagtcaaataagtttttattcatatgtcttgtaaatattattgtggtttgcgtctattattactttcttgaatatgtacatttattgaaagtttagactcttgaaacttgaaacgtgttaatgtgtcacataaattagaacatagagcgtaattttactggttcattgttatgtattcgttttcccgttaggtgactctgttgcaatatatttgtttgccatttccttcattatttatgtgtgtttaacttctcttgaatttttaattgattggtttatgagactgattttctagaaatccttgttgtgcaaattgaaaatattatgagaaatttttaacgattacgtaaatgtgaaacgacagtctaatattttgtcaattcctagggttacattgtgcgactttaaaaaattagggataaaatctaaatagtggcctagaaaaggaacatttgtgtaaatcaataatatttgagcttccaaatctttagttgagccatgagcatttcttggaatgttaaaaggaaaactacaaagaacttggagatcctggggaaactttgtagtgaaatttatctagcctctgtaaaatactagtttcaatttatgtgatgttgtttgatttgatacagaatttaagaaaaaaaggaacacttttgaaatttgtggtcgtttgtgtagctacaaatccttgtcattttaaagataaattgttattaaatatagaaatgtgtcatcgtttttttgtataggctacaaagtaaattgtgtcaaataaattgagacagaaggagaataagatattgcatatgcaaccagattagagcttaattgggttttttagttgtatgtatgtatcaaattgtttcttggaaatcttatttcgtatagtttaaggatatttttgttgtctaaggtattatttgttgctaacttatttgttcttcaatag

SEQ ID NO: 1053 - DNA, 90 bp, Solanum tuberosum
  source 1..90: mol_type = genomic DNA
ggtaatgaattgaaccatcaattattaccattttgattgaagaaattcgaaaaattctgttctcagctatagtatatgtttcatatatag

SEQ ID NO: 1054 - DNA, 480 bp, Solanum tuberosum
  source 1..480: mol_type = genomic DNA
ggtaagatactcacattctgtaattctttttttttggacgttgatcatgttccaattttctataattaaggatccgttcttactaggaatcgatctcatggatattagtactgtcacgtattaaccaggggagttatatgacttttagtgacccttttgttgatgatttttgtcggagatgtcattagttattactgataattgtgagtatggctggagaagtgttagaaaagatgaggaaatttgtggaatgattttactaacttggtaacaagtgaagaagcaacttagggtggttttcgaaatgttttgatatgcttttccttgagctgaggttctattggaaatagactttctaccttccaaggtatgggtaaggtctgcatacacagtaccctcccagatcccacttgtgggattacgctgagtaagttgttgttggttaacatgaaaagtatatgattcttgtctgccttgtag

SEQ ID NO: 1055 - DNA, 197 bp, Solanum tuberosum
  source 1..197: mol_type = genomic DNA
ggtaagcattagtttttcaattaagtatattcgagaacagcctttctacctccatgaggtagtggtaaggtcttctctgcgtacactctaccctctccagactccacttagtgggatttcactgtgtatgttgttgttgttagtcagtatctttgtgatgattgatgcttaaaatatttgtgttctttgaaatgtag

SEQ ID NO: 1056 - DNA, 992 bp, Solanum tuberosum
  source 1..992: mol_type = genomic DNA
gtattctctttgttctctcttttgaattggtgttgtttgagtttagattcgatgatagaggaaattcatctgaagattgcgcaattgtcaaacgaaattgattttattaaggtcttaatacctgaaatgttacttaatatattagagaaaatgggcattaagttgaatgtgagtatatatacttccacagaagcagctaaagactccgccaagagtagaaatttctcaatttcgatgattaaatcacgatctgctaactagagttgatgtctttttttctttttgaagattacactatccctgtggcaacagatttttcatttttttttttctaaattaagtctgtcaactatgcatcaatcagaaactaatgggggtgtagtactcctctatatctatttttctagtcggacacatttcgttccagcaatttaaagtacagttttcatttatcagaagaaaaaaagttggtgtatgtctggcatgatcacattacttcattgaacttgtacatatgccgctatactgctttatattttgtataatgttggtgtgagatgaatttgaatggggaaacatggtcagtgattcatattgccgacccgaactggtttggagttgaggtgaaattgttgtagctacttttggttttatatcttttttggaactactcattcctggaaaccaaatctcagtaagtcagttttccttcacaagatgcaaactttgaattcaatttctggttatgaagatcatcatcctatcgactcaagcatgatgctattcctttcctagtggaacctgctattcagttttatgaagtgatagactgttttgtaccaagtatttgctttttttcctttatttttttttcttgtttagcatttccttttggggccagtcatggtgatatattttttgaactattttgatgtctatatggacagtaaaatggtgtgtcaattctcaatgttttcatgaactaatgcagt

SEQ ID NO: 1057 - DNA, 451 bp, Solanum tuberosum
  source 1..451: mol_type = genomic DNA
gtaaatatctctcactttatgcttaccctacattgaaaatgtgagggttctcttgcatttatcgaaaactagtaagctcttcttagagaaagaaaatctgggttgaaacttcattagttcaacagttgcttgctaaactagatgttatagctacttcttgtgaaatgaagttttaactctattttgttttctgatacacctcaggattttttgagttctgcttacgtagtatactcctgcattctttgtttaaacttatagcttgtaactaggacatagggaatcttcccatcatcactttttttccttatgtcctcttatgtactttgctctcttttattcttatattataccattctctaatatattttgctatctaaccgttgagctccataagtgtactcacaaacttgttgacgaatgtttaactcatttacattcttcctctagg

SEQ ID NO: 1058 - DNA, 142 bp, Solanum tuberosum
  source 1..142: mol_type = genomic DNA
gtagatttctctactgctaacttccctgtgaagatttctaattggtttaaacttttgcttgctaatttttctttggaatgcttattgtatgataagttcatggttaactgacaagactttcctttcattccgctggtgaaga

SEQ ID NO: 1059 - DNA, 95 bp, Solanum tuberosum
  source 1..95: mol_type = genomic DNA
gtttgtgttaatgtttactttttcgagaaaagcattccctctctttactgcttcaatgattcttaacttatactcagatttacttgaattacagg

SEQ ID NO: 1060 - DNA, 625 bp, Solanum tuberosum
  source 1..625: mol_type = genomic DNA
gtaccattatacatgtatgagttcttggggcataatcattttcaattatctgcgagaaggaccttcgataggagtgtttagaggttgcggatttgggtagaaggttagtttggtagttgagccttctctcgcttcctgcgggataggcttggtggtcatccttggaccttccttcttaccagtagtattagcactattctcgtagtttcttgtactttgatttagtttgtgctcagattattgcattatttcattgtcattacttttctttctgcagtttgttgtgtaatgctctccatttcgcattatttcattgtagttatgctctcatatttatatccccttttttcaaactgtttggcatgctttatttaagatgagggtctatcggaaacaacctctctacatctatgggtaaggtttgcatacactctaccctcctcagaacccacttggtgggattacactgggtatgttgttgtttcgagaaggaccatcataagttttgatattgcaaatttcagcgggtatttgttacaagggtgggattaattcgatattttgcttctacttaggcccaatctggtgatggatttgctcatttttgatgttccaaatatgcagg

SEQ ID NO: 1061 - DNA, 308 bp, Solanum tuberosum
  source 1..308: mol_type = genomic DNA
gtaagtttttcataagcatagctgtttcatgatctataatttgtctcggttgaacattgattcaaaagagtaggttaattcttatacagtttgaggtaatcaaactaggagttgctactcccaaacctagaactgttttcctgcatagtccattgggctccctgtctaataagattgccccttcaagctggtcataaaggcagtgttttttcagctatttgttcctttggtgacacacggtaatacttgctatgaaccgtggggatattttttcttctgtatgttattcagaaatatcttgatgcagg

SEQ ID NO: 1062 - DNA, 106 bp, Solanum tuberosum
  source 1..106: mol_type = genomic DNA
gtaattgccaacacatacttgaaataaactaaatagggtcattcatgctatatttgattattttaaaccattactggagttttgatggtcagtcaatatctgaagg

SEQ ID NO: 1063 - DNA, 74 bp, Solanum tuberosum
  source 1..74: mol_type = genomic DNA
gtgaattacttgagtcataaattaatccctttactacttcttctggctagtaatggtatttgcttatctgcagt

SEQ ID NO: 1064 - DNA, 188 bp, Solanum tuberosum
  source 1..188: mol_type = genomic DNA
gtgagtaggctccatccataataagcttttaattggaaaaaacaaaggcactactattttttaagcttttctactaacttgaactggaataaggtatgatactttgctcttggaagtaaagatccttttttctcccttaagaaacttggtcattctgtaactcattatttcacttgtttttcaacagc

SEQ ID NO: 1065 - DNA, 613 bp, Solanum tuberosum
  source 1..613: mol_type = genomic DNA
gtgagcatgcattcccatttttattttcctctttcacaaatcaagaacatatctttttcgtaaaaatgcaccggatttactttcctcatagtggggaagatgaaaggcaattgatgttttcccataaagcaagctaatcctgcaaatcccatataacaccagatgtcaatgtgacacgtgttatctaataccatgaccatcttttgtcttacagcttcttaaatttggtagttcttttgctgtttaaatactattttcacctctcaactattcaataggaaagcaatagagtgttatctacaatccaatttgtttcagattaagtgtcaattaagtccttgtgaaaaattgaagcaagaacacattgtctgaactgcatggtttgaaatgctattatatgcttctccaaacttctactttatgggttgatgtttgtgaaaggaagctaaatttaaatattattccacgcttctggaaaattctaattgatgggttgatgtatgtgcaaggaagctagatttaaaatattatttgacgcttctccaaaaattttaattgatgggttgatgtatgtggaaggaagctaagtgtcactttttctgtccatttcagg

SEQ ID NO: 1066 - DNA, 107 bp, Solanum tuberosum
  source 1..107: mol_type = genomic DNA
gtacttcaactttgaaatttcttatgtattctttgccatagtgttgtcatttgcaatccatcatttgtttaatgtaataatcattacttcaaattttctcttgcagc

SEQ ID NO: 1067 - DNA, 871 bp, Solanum tuberosum
  source 1..871: mol_type = genomic DNA
gtaacttactcaaaatactcttccttattataaagctttgagaacttggagctgagtagtgcaattgtgcatggttgattctaaatgctacattattgtcatactcttctaggaagttttaactggtgtgacagtttgctttgagtttatgaaccaaagtatatccttgattttatttttctcaggactaatgtttgatcaatctggcagagaatttgaactgtaaagctgttatgttataactttgataacactcttttattgtgcgaagaactctaattcatctccctgtcgattttgaattttctgattcccctcttgtggcatcaaaatttgctaattccctcctcctggtagcagtcagctttggtatctctgactgatgactaattcctcatagttgttctattttttgcctgttcataagtacccttctgaaattgttagtatcataactaacatgaaatgcatgaaggcatatctaaaagtgcaaattaacttgaaatgtgtactcattttcactacatactattttaactctcatcttattacgtatgataaattagaatatgaaattctattcgagagggtaggagtattgtttagaaatgtgctatattaggaaaattcaggtatacactttaatgcatgaagaattcctgttaagaatatccgtgagctgtcatcaagaaggaatatcatctctttgtgatttattcacttgaactttacttgtgcagttaacatatcctttggtttactgtgggaatataaggaacaaactctttcttacccacctcatgtccacactcatcattttcttgtttccttaaataacagttattttcccttcttttcaaacattgacagc

SEQ ID NO: 1068 - DNA, 343 bp, Solanum tuberosum
  source 1..343: mol_type = genomic DNA
gtactgtgtgactcttatttgttcttttcacgatttcttgaggtttttggtttatgaataaggtttatgcaactaagtagcatttattcgaatagtcttacccacaaaccacaataaaatacctcgaactggtacctgcagctaatggtggtttctgctctatatgaggtcaagtcaatcaagagatggagataagaaagtagttgggaaaggacgagtagggttttgcatatctaggaagttggattgcattgcctacaattgttttgtcttttattatgcatttcttggttttcttaaagtagttgaaattttctctattttatatgttttctgcaataga

SEQ ID NO: 1069 - DNA, 1049 bp, Solanum tuberosum
  source 1..1049: mol_type = genomic DNA
ggtattttgtttaaatgttgctgcatatcttttgatttgttgaactcgtgctgattgttttttttaattgatttgagaaagtgtaattgtgatgctgatacggtgtttgtctaaatgtttatgtgtatttttcatttgttaattcgtgctggttgtttttgatgttgtaagtttatgattttatgcgtttgagaagcttaaaattatttttgcctacaatgtgtttgtttaaatatttatgcgttttttttatttgtttactcgtgctgattgtttttttatattgtttgtaaagaagctgagaattgtgattgcctaaaaggtatttgtttaaatgtttatgcataattttgatttgttagtttgtgctgattgttttgatattgaaaattctgtgagtttttatcattgagaagctgaaatcacaaacatttaaacataaattgtgatgctgccaaggtgtttgtttgaatgcttatgcatgtcatgatgtattttgttaatttgagaagcataaaatcgtgattgcttacatttatgtttgattgtgcctacatggtgctgtttaaatgcttgtgcatacactgatttgtttatcttgtgggattacgtttgatatggtatgttcaataggtttaccttttcatatatgcttatgatttcattttgttatgtgaacatagtcatgttatcacacttcaggtctggtatgtgtgtgtatttagagaatttatagttttagagaatctcgacttgctttaaaagatgaacattgaatgaatcaatggctggtacacagtgggtgggtgctatgttgattgaatctattcttgaggttgtgcacaagtaacctgagaattgctattgcctaaaggtgttctcgaaatgtttgtacatataaagatttataaacttgtggagttggttcaactatcagtctatcacaaattctaatgtttattgatttcatttgcctgtgactttatttttttgggtatatagatagtcatacatgcaccattgttgcttatatgtgtgactatatgcag

SEQ ID NO: 1070 - DNA, 461 bp, Solanum tuberosum
  source 1..461: mol_type = genomic DNA
tgtaagtattctctattcatatcaatgacatgactcatttacttaagcgtctagttcaacatgcgacgactttgagccgtggtgatggagtcttcaatatgttatttgatgttagataattgaaactaatatcctgattagtgacagtggcctcccatttttgcagccatttaattttttcttttcactttcattttcttaaagcttatcttaatcaatcttcatgaaatgtggttcaccaactgtttagttattaaaactctccctcaattttcattcatagtctaactttatatagtgaatttttgcgtagctgaccataactcatttgggattgagggttggttggttgtgtttgcttagcaacaattaatatgaatatgcttcatgctgtgggtcacttattctgcaacttctgagaaacttatccttttcctgatggtgcttttgttttctaacag

SEQ ID NO: 1071 - DNA, 220 bp, Solanum tuberosum
  source 1..220: mol_type = genomic DNA
ggtaaattcctttttacaattgttacttaatcgaaaattagttgtgcttttggaaagtcaaattaggtgaacttgacatgagaaaagttacaattggtttaatctaatttcgctgaactgaaatatgacaactaatttgggacggagggagtagtagatgaaagagtgaattgtagatgaggatatcagtaactggtttgataaggtgtatgatttgtag

SEQ ID NO: 1072 - DNA, 171 bp, Solanum tuberosum
  source 1..171: mol_type = genomic DNA
ggtgcgtgtatttcgatgtgttacaatcgaacttttagttgacataatgctctagttgttgtgttttactgattcgaggataaattctaatgtaacagagtattgtgtgacattacaaagagaaatgatttctttgagcttatttatctttctgatttttctcactaaaag

SEQ ID NO: 1073 - DNA, 160 bp, Solanum tuberosum
  source 1..160: mol_type = genomic DNA
ggtgagctttcttatgagttaacagttgtagttgtcaattggtgaaaatcacttgcacttttgactatttgaggcctttgttgttcgaactatttgttgtgttccatgggctagacaaattctcaccctaatccttcctgaaaaattgtcccattgacag

SEQ ID NO: 1074 - DNA, 597 bp, Solanum tuberosum
  source 1..597: mol_type = genomic DNA
ggttcgtgttccgttcatttttagtgtcattctacattggtcccatctgacaacattagaagtcgtaaatgtaccttttttcttaaaggtgcttgaccacctaaaccaacatccattgttgaccaatctaaacaggtttttggttctcaaacataatttgattttcataaaatgctttttaacaccataataacaggcctctacgatattttttacattattaattgattgtaatatggacatctggttgccaaagaagaatgtgcatcaaaattttatctatgaaaggactcactttatcattatgttgccaaagtggcacatatctgattgtttatcatataattcactaacaagatttcctctatttatattataaatcaccagttttacccactaagagagcataaggtataaaaggctggattcacgatgacttccagaattactaaaacacctcatatcttttttagagtattacatatagctccctacaaaccggaattagaagataagatatgagcttgttactgagacccaaggttgctggaatccttttctaaatttctctcttctgctgttatggattctatgcag

SEQ ID NO: 1075 - DNA, 377 bp, Solanum tuberosum
  source 1..377: mol_type = genomic DNA
ggtcagtttctatttgggcgttgctgaaaatccagtcaaatttctgtaaatataacctatcaataactcaatttgttgtttagagggcaaatactatttcacaatatatgcatatgtgtccatttttacttgatgaatcagctcatgcaactctatttttgaacattcttccatttgacttttgagcaagagggtaaggtgctaaataggtttgaattgttatctcactcaattaaatcttcaactattaagaagtgagcatagtaagatcttttcagtggctcttggtgcacgtacgagggtgtagttgggttctcaaagttcatcactatgtttgttctcttatttttctttctaacttctctttacctatacag

SEQ ID NO: 1076 - DNA, 843 bp, Solanum tuberosum
  source 1..843: mol_type = genomic DNA
ggtagtacttattcatttccttcaacatctgttggatttccagaggtgattaaagttgttagttttgataatcttggttgtacttttaaaagttctaaactcgtagcaaaactttgttagataacaatcttggttgtacttttaaaagttctaagctcatagaaaaactttgttagattgaggaagaagaaaacatttatgtcattgttgagcgacatttatgaacatgttacatataaagcagaatctgttcctttcataagctagtgtatatcacagataagcttttctttcacgtaaccgtgtgcctttctagtcaggcattcacctgcttgctgttgtggcatgtcctggtccttaggtttattgaattttatctttcgtgccttagcattgggctactcggcgctgctaccaccaatttaatacatacccaagtagcctcatcctactatatttgacttcttttgctaattacagtagttttccatccctgaaaattttaattaacataaaataacagtacatatttctcttatttaacggttatggacttcgttcagtcaaatagccccacttctcactttccactaataatatctgatacatatttgactaactaatgaagtacttgatgctttctattgttaatggcaaaaactaaatattattaacatggggagagaaaatgatcaaaatgtcatgaccaacttggcaaacttctcctgttctctttctaagattgtaccatacattaccaagattcttccaaatttttagtgataatctgattttggatttataattaatagtatcataatgtctttctttcaaaaattatag

SEQ ID NO: 1077 - DNA, 456 bp, Solanum tuberosum
  source 1..456: mol_type = genomic DNA
agtaagttttttattcatgtactggacttatggttgttctttgactttattgtaaacttgtctttatagaactcattcatttttaattctttgaactgtgatagtttttttgttttttgagttgctagtaggatattttagaaagtaagtttttattctccagctttctgagtaaatcagcggtgaccagacaacccctgagatgaatcacagatgggttccaatgtttcttgtttactaatttcatctcacatttactttactccttttgaattaccttatcaaaaagaaagtttgtgctctctaattgttcattctttctgatgatttaatctactcttaaatttcttcatgaacaacttacatggattgcatgtttttatttctctttgtgtctgcaatttgattgcattgtttcaataatttatgtgtagccactttgttggtcttttatag

SEQ ID NO: 1078 - DNA, 706 bp, Solanum tuberosum
  source 1..706: mol_type = genomic DNA
ggtatcaactttctgtccatagaacatttagagtgggaaggaaggcggtttcacctagacatgattctttgcactgtttctaccttgcaagttaacagtttctgaatcacttcaaaaatatgtcgtggtaacatttttgttactggaaaccatttcgctgtacataaatttttgaactgttgtgtcgtgtccttctactgccacatctagatactaataatcttgagaagtgcttggtcggataatcatagctgcagcactactgcatatacactagctgctgataacctcaataaaccatgttaaatgcatatcttagttgtgagttctttgtgattttcttctttactacacattgtcgaattacaataatcaatgtaaggtttgcgaagtaatccaagtttaagttttccagaaatttatggtatctggagaggaatgtgattacaaatttaagagttattgcagagcttctgctttactttttcactgtattttgtttattcaaaaataaagatgttattagtgtacaagtttttctgttctttttatcttactaacacaaatcatgttagattcagttagtgttgatcctgtgacaaacatagacttgacaagcctagctgcatgagagttacggttactttttatttcttagtgatgttttcaagtatattttctgaggttcatttggttcatattgcag

SEQ ID NO: 1079 - DNA, 443 bp, Solanum tuberosum
  source 1..443: mol_type = genomic DNA
tgtacgtccatattaccttattctgggaactttagtaagaattattgaacaactcccattttcaattacttcccctagggtataaaggcctttaaaaaactggagtagatcctgtacatgacaaagtggatttggactatgtagtcaattggaaccctgttgcatcaggtctttcctgagacttattttcttctatgcaaatggagagagagatttgtactctgggcgggtgggggtagttcgagacatcgtagtatcattttgaggctacagtctactgtggtcaactgatgatgccaatttcttggcttatatcgtttagacaaagtggtgtttttgaggattaaaatggtgaaacacaattgaccccaccccccaattacctcaaaaaagaacaaggatctgtagtatggaaaataagtagatctgtggtcttgtttcag

SEQ ID NO: 1080 - DNA, 176 bp, Solanum tuberosum
  source 1..176: mol_type = genomic DNA
ggtgaattgcaacttatgctctttttccctagacaatgtatctgatggaatcatgtgtttgtccgtgttcttctaatttaggaaagtaaaaatcggaagtgttaacagatgaaataaagaagaaatgcaatcttcaaggaaagtactgatttttcttattatgaattttattgcag

SEQ ID NO: 1081 - DNA, 424 bp, Solanum tuberosum
  source 1..424: mol_type = genomic DNA
tgtaagctaccctttctgaacataatttgttgcagtagtttcacttttactcatgcttattgacaaacttgactttgacacgataccttgaattgaaaaattagttaatgtttcttatttctggtagaaatcgtattccaaatttgcattttaaaatgtagaagtcactctacctgcttaagatgtcaattctttcggttgcctcttgcttagttgtttttttttttggttctttgaaattatttacttctgattcgactatgatctcttcttttgaggggattggtgtagaaaaaaaagtgtaattatcatcaaactgacaattagcctgtactcgattatgaatattttgttcttgtcgtcattgaactaatgtttatcatatacctgattatgatacaaattctttgtctgtttactacag

SEQ ID NO: 1082 - DNA, 864 bp, Solanum tuberosum
  source 1..864: mol_type = genomic DNA
ggtacatttctttttttgttatatttcatgattcaatctattaatttgtttgtgttgtgaaattggatttaagattttgagtttacgagttctggtaaatgatttatatgtatgaatatgttgttggtgggaggtgataggtattcgtggagtaatctaggtggcatacacatcataattataaaagaaaatgtataggtaggtgcacatgtttcaaatcggattatgtagacgcagtcttaccttgcatttctacgatatgttgttttccacaatatgaatctgtgacagcaaaatccgaaaacttttttcatgtgtttgatttgcatctgatttatgtgaatcatgagttgtgtaagtagctagatcgatgaatatgaataaattgtaatttgatgaatataactacttatgtttaattgatttgttgctagtaacttttaggggattttgatatttgataatttgttctaggtcaattgctatttagaaatgttgattataggttaagaaatggacattaattagtctaactcaaccgcaaaatctagttcatgagatgaggattgtacgatcatatttggagatcaatgtgggaattttaacaccctgcacacccgagcctgtcaattatagcgtagacaacatcatcagataaaccaaacactaggatgagcctgacgttgatgccatgttaagaaatggagtttggacctaattcaacctcgaaagttaattcatgaggcatagattgcctaaagctatataaggagaccaatttcccatcctacaatcgatgtggaacttctaacgttatgtctttgaagctgtgtatttttactaaagattcagttttcgatgtag

SEQ ID NO: 1083 - DNA, 220 bp, Solanum tuberosum
  source 1..220: mol_type = genomic DNA
ggtaagctgaaaattgtatatatagaacagagttaatgctgcaggatgtttctctgactcttgaggatgtttgttgtatctgtttcggatcctccaagaatgcactacttttggaggatccgatatgctgcacctgtccacatttttgaagagtctggggaacatagatttgatgatagttataaagttaagtagagtctgatgatgtttcaatatctag

SEQ ID NO: 1084 - DNA, 132 bp, Solanum tuberosum
  source 1..132: mol_type = genomic DNA
ggtaagcaaatcttcattcatttatgtctgatgcatggtgaatagcctcgagggaggggaggggaggggtaaggtatgtgtacactctactctactctgccctatggcgctaattcattaaggtttatacag

SEQ ID NO: 1085 - DNA, 301 bp, Solanum tuberosum
  source 1..301: mol_type = genomic DNA
ggtttgcatctatctttgtttcatattccatccgttcacttttactcgtcatgtttcccttcacgagagtcagtttgactaatttccaaacctaaactgaattagatcacttcaatactataagttggtcaaagtccatacaatttgactctcgagtatgacaagtaaaaatgaacagaacgagtactatgataacatggtttagtgaggattcatatcaggtcgactccgacttatttagctctgcctctagttgtaaggttcatacagtttctgatggagttttctattttgtctgcag

SEQ ID NO: 1086 - DNA, 245 bp, Solanum tuberosum
  source 1..245: mol_type = genomic DNA
ggtacataaaatctatctactttttgtggtctgattcatttcaaagttgcacatcttaaagcttattcactatcttcataagcagtagattactttagcatgtttgagaaatccgaattatctgagagcaaatgctgaccagtacttcctatgctaaatgctgagctctttcaaaggaatgtgatgaacaattgtcaaggacgcgtaagatatttacttacgagatttctttttttatgatacag

SEQ ID NO: 1087 - DNA, 221 bp, Solanum tuberosum
  source 1..221: mol_type = genomic DNA
ggtaagctctgccttcgctcaaccacttacaaatatttttgtcaaatgctcgaaaccagcatttccactgaagtataagattgattattggttgaaacattgtgttgagtcctgtttattaggtagagaacagaattaatgaaaacgaattattaagttagttgtgttcttcaacttaaaatcacgcgcgtctgactgtggagtgtgcattttgatgctag

SEQ ID NO: 1088 - DNA, 111 bp, Solanum tuberosum
  source 1..111: mol_type = genomic DNA
ggtaactatgatatttcactggattctcctgaacttttggtctcattaaagacggcattggccttatttgatctgaaatactgactgtaaatcttgtcttgaacttgttag

SEQ ID NO: 1089 - DNA, 1544 bp, Solanum tuberosum
  source 1..1544: mol_type = genomic DNA
ggtacaatcgttactattgaatcttgatttttttttcatgcacaatacatgtttgtggatattcctcaataaagattgattctttggtgaaagaagtttgtgggtgtcatttcttttggattgatcttttgatttggtggtgtatgtgagttgaagatctttcttattgtcaatcaatgtttgtggatgtttttttttatttttaaataaagattgatactttggtgaatgaattttgtgggtgtcatttctttgatcttttgatttggtagagtatgtgattttaaaatctttcttattgtcaatcaatgtttgtgaatgtttgataatttggagaaagaattttgtggttttcgaacctatgttgctcggactctttaaaaatgtcgaaggttgtgttagatcctccaaaactagtgtagtttcggaggatccaacattgatggaacaacatttttgcagagtccaacattttcctctcattggattgatcatttgatttggtagtgtatgtgattttataatctttcttattcttaatcaatttttgtggttatttgctaataaagactgataatttggaaaattaattgtggtttatggacccatgttgctcggattcttcaaaaatgttgaagtgtgtatgtcgaatcctccaaaagtagtgtatttttggaggatccaacacgagtgcggcaacatttttggagagtactagcaccattttcctctttttggattgatcattgatttggtaatgtatgtgattttaagatctctctctctcaataatggtggtgaatatctcttaataaagattgataatttcgagaaagaattttatggtttcctcctacgttgctcggactcttcaaaaatgttgaagggtgtgtgtcggatcctccaaaagtagtgtatttttggaggatccaacagaggtacgacaacatttctggagagtccaagcacctttttccttttctttggattgatcatcgatttggttagtgtatgtggtgattttcatcctttttgtttgttgatttattttgctgaaaatggataatagttttactgttgaaggtggattcttggatctgaaaatgggtatcttccatttgagattttgagtgaaatgtcaaaagctagaaatcattttatttaattgctttctggtctgttttttctgttcccattcttttggtagatctattttctttcaatctgttctttcaaagatatactattgattaagcatgcacctcaattggcatttctgttatatttatttttcaaatgaatttttttgacataaatatgatttaatccaatcatatttatatcctatgatttcatccaatcaaattgcatgagatctttatatgttgcagaaccatttttctgttggagataaatgaaagagcttagctctatttgttgctattgttctgtggattaggattttctcacttattgtggtgtttgatcttatctatgtacgttttggttttagtaacacgaatatatcgtctatctaattccag

SEQ ID NO: 1090 - DNA, 1833 bp, Solanum tuberosum
  source 1..1833: mol_type = genomic DNA
gtacgattcatctgcattttactacaatttcaatcgatttttctcgcatttttttgatattgtggtgtaattgatcgatttttgtagtaattattgtgttttcgatccgtagatctgttcatcggtattttactacaatttcaattgcttattctcgcatttttatgataattatgtttgatattgaggtgtaattgatcgatttttgtagtaattattatgatttcgatccatagatctattcatcggaatattcaggtgttaattgttagttgatttgtggaaaatagtatcagaattgaatgagctagcatatttatggattttgcagatatggcatagatattgttatccatggaaactgaattgtttttcttcctcttttttttttatatatattgaggttgattgatcgatttttgtagtaattattatgttttcgatccattaattggaatattcaggtgttggttgttagctgatatatggaaaatagtatcaaaattgaatgagctagcacatttactagattttgcatatatgacatagatattgttatccatgaatgcataattgtttttttttttcctttttttctctttacacggttctcttagattcctagttccgagaaaaagttattcatctgcattttacaatttcaatcacacaatcgctttttctcgtttttttgataattatgtatatgatattgaggtgtaattgatccatttttgtagtaattatgtttttgatccgtagatctgttcatcagaatgttcagttattgattatatggaaaatagtatcaaaattgaatgagcttagcacatttctagatttagcagatatggcatagatacaacttacaagtatccatgaaaacagggtttttcttcctttttttattaggattttgttggatctgctgagtactttttgagagtttatgtattattgaattaatgtgatggatctttgcgtgttaactgataatgtcgtagagttctggaattgcttggcagaacagcagaagcaaatctaatagtgatatttgttttgatttgatatgatgatcctagggaaatagaacattgcagatgcctttggtggttatcccgattattctaatgattgtaatgcactggatttggggaaatatggaatctgaatcatgtggtttatttgagtctcattgttgctttttgtgtgaaatagaagctattgagttttgtgggtaaattttatgaaacttgaagtgcattatgtattatggattgtgtgcagttataaggcttgcaaaaagctgtacacctgtacctattcaacctaataaatgtaaaatccaccaaaaactggtggtgattttatcatttatccattatccatggaaaaccaactttgttagtgtatctcgtgagctggtttaatatgtccaaaatctctgatgttgtgaaacatatttctacttatttgttgatgcactgatttatcattagctaaagtaatatctataattgttaacatactattattcaatttatgtgcggagcctttactttgtcatccgtgcaaagagagaatatatttccctgaaaactgaaaaaatagaggttcgaagtaatagtaacctttgactgaaggaatagtatatgaacatctctttcccataaggtgcattcttttatgtgggactttatgtgttcagcttatttaaacttgtttgttatttacaaatagcgaaaacttgtataaggaatcaagatatcagtatcagatggtaattttttggacatatacatttcttactgaggtttcgtttttcaatgcagg

SEQ ID NO: 1091 - DNA, 121 bp, Solanum tuberosum
  source 1..121: mol_type = genomic DNA
gtaagctcaagtgttttgtactacagcagagttggcctgccattttttactgatgcttattaccttgttgcccattctgtttacaaaattaagagattcttatattggtttattatctagg

SEQ ID NO: 1092 - DNA, 202 bp, Solanum tuberosum
  source 1..202: mol_type = genomic DNA
gtaagaaaattttcattctttattagcataattattttatattactgacatctctcaagtttcttgatgcttctaccatgtaaaaatcttgcacttatatgatgctttgtggatatgattacttataagttgtaaccttctaattttgacatggttgttatcaattgagttattacttctaattctttttcttctccgcagg

SEQ ID NO: 1093 - DNA, 128 bp, Solanum tuberosum
  source 1..128: mol_type = genomic DNA
gtctgcgtcgccccttccccttccccctccctcctaataattataagtttgctttttttcggtgtctatcgtacttcgaagcttgacagttactgacggtgttttctgcttctcttattttctgtaga

SEQ ID NO: 1094 - DNA, 967 bp, Solanum tuberosum
  source 1..967: mol_type = genomic DNA
gtatgttttctgtttactgttcgcagatctattgtttttgaattgcatttgatgatttttactgtgatcgatgattttttgctatagtagagtgattttttttttcagtttcattgtatattttgtgaaaatcttccgtgtaggactgtatttttagatctgtaatgtcataatgtaatttttgatgagttgtataatgattttctgctatcgtaaaatgattgattgcctcattttccttgtctactatgtgaaaatccttcgcgtatgatgatatttttagatctataatgtcatattgtgatattttggttcattttatttagtttgatctgtttctgcaatattttctacttgaacattttagatcaatgagttttctatgttttttagcttattgcatttgtgatttttgatgatttttactgtgattaatgattttctgctacttgaaatgatttttgcctcattttccttgttttgttaaaaatctactgcaaatgatagttttagattggtattgtgttttttttagctcattgcctcattttcaatgttttgatcgagtgaactttctgtgttttgctaattttgagatctgagaattactgtttgttagatcacatgttgtagagttgctgtatttttgtgtagaatgtactgtgagtagtttaattgttgagatctgtggaaaatgtgatttgtatagttatttgtgtgaataatgtgcttgatgtaatagaattggatcagtatttcgtaatgatattgatgctatttaaacgcgcaaattgcttcaaggactaaggtttatccactgaaagtaatgattctataggtgaatgtcgtagtgatccatttagtttagtgagaatcagatatatttgattgtgaatcatgaattttataatttctgtagtggtttttaatttaagagaagaacttagaacatcttgtttattacaga

SEQ ID NO: 1095 - DNA, 112 bp, Solanum tuberosum
  source 1..112: mol_type = genomic DNA
gtatattcatggatttgagtagtatttcttagaatccttagtcggtaatacaactgtgcttaatttgatcactattgtggtgttattgatacatttttctactttttgcagg

SEQ ID NO: 1096 - DNA, 218 bp, Solanum tuberosum
  source 1..218: mol_type = genomic DNA
gtgagtatacgttgtccaaattgataatttttactttttgtctatgtgctttgattatcaatgtatagattttaactttcgctttcacccttttttgaactggtgaaaatgcaaccttcataaataagtatttggttataaagtggcttctctagaattgtgataggttttcttctcatcttttattacacttgctaaatgctttatcatgttgcagt

SEQ ID NO: 1097 - DNA, 82 bp, Solanum tuberosum
  source 1..82: mol_type = genomic DNA
ggtaagctgaagagaagaaatactggttctctactgtttaatattagctagtcactaattacatttgttatttttcaaccag

SEQ ID NO: 1098 - DNA, 84 bp, Solanum tuberosum
  source 1..84: mol_type = genomic DNA
ggttagtaagaacaaacctcttgcaatttcagttttattcattgtgttgctcgttgatggatattcaaacacttgtttcattag

SEQ ID NO: 1099 - DNA, 102 bp, Solanum tuberosum
  source 1..102: mol_type = genomic DNA
ggtaatacataacataacacgtgtagctcacactattacaatgcttgcacgtttcctcaaactcttgctttgtagagctgtatgtatttgttaattttttag

SEQ ID NO: 1100 - DNA, 94 bp, Solanum tuberosum
  source 1..94: mol_type = genomic DNA
gtaattatctcttttcctatgaattttcatctcattgtctttatgttgtaattgttcagtttctaactttgaggatttcaattttggtgatagg

SEQ ID NO: 1101 - DNA, 725 bp, Solanum tuberosum
  source 1..725: mol_type = genomic DNA
gtacgatatacttgaacacatttttaaattttcgaaacatttattaaaattcaattctaataagtaattcgaatgaatagactagctcagagtactaaactttcgttatatacataatcgagagaagcactagatcattttcactttacacgtacggtatctccggaacgacacctatttattttttggccatcttaacaaaaatgtgttgctgaaatttctacatgacaaatttttgatgacttgcctgaattaataggatttgggggacaatttctagcgatggtcatgatttatgacaagacaacctgacgaattttatggcaatctgctaaaatcaccaaagtttggttgccaatttttggtgttcgatcactgtttgtgataacactatctaacgaatttaatagcgattcaccaaaacaatttctggagattatttttttgccacaaatctacttatgtaaattgagtgaccatatcatgagatattatctctggaatgaaagaacctatttgtgcaaattaccttcgattttattgtatgctaccttattttgtatttctttgagacactaatactacgacttaaactcgtgatcttttgatcacacagtgacaactcttaccattgcgccaatgctccccatcaatagataaaatgtcatagatttgccaattatatatatgttccccttttgatttgtgtaattgtcaattatagg

SEQ ID NO: 1102 - DNA, 98 bp, Solanum tuberosum
  source 1..98: mol_type = genomic DNA
gtgaacaatttctcgtatttttgttactctgtatctgagaaattttatccatgtaaaatgttatgtagaacgtaagaacattgaatatcgaatgtagg

SEQ ID NO: 1103 - DNA, 175 bp, Solanum tuberosum
  source 1..175: mol_type = genomic DNA
gttagtaacaacttcgaaatttacacaattcagttacgttcattgtcattagttcatatagtttgtttgcttgtgtttaagatctgatttagcaagtttcatcactgatttagtcgtaagttatagagaagtttgactgtgtgtcattttattttatttcactttgaaatgcaga

SEQ ID NO: 1104 - DNA, 637 bp, Solanum tuberosum
  source 1..637: mol_type = genomic DNA
tgtaagtagcctcaatttaatctgaattacactggcatatacttacatagtcattgatttccttgagataacttttagcatcatgatagaagatatctggatcttcactagtaagtgtgcatgttttcacacatttgacctaatattctctacgtgataatggtctttatgatggtgcagtcaatcctcctcccccctccccattttaatctgttttgaattaatttccccttctgttctcttgattaaaattgcattttgaacccaaatagattgtatttctctctatataacattaattgtgtgtagtttactaatataggctctcttggcaaaaagttgcattatgaatgtagacttggtggtatttttcacttgtctaaatatcaatattatgtttagtcaactaatacagctctagaggtcctctataactggtatactggccatctgtgagaattaaactaagtttgtaaacattacttatcatttcttagcttgtccctttaatctgcataaaatctactttcctgactgttgtttggttagctatatagccctatatgctttatgatgttttgtatactttattatctaaagttgcattttctgattctgttccttcatcttctaacag

SEQ ID NO: 1105 - DNA, 672 bp, Solanum tuberosum
  source 1..672: mol_type = genomic DNA
ggtgtttgtttaattgcttttatgcttcttgatttgtttagattgtattattttccttgcatttctggcttctatctgttttatagatttaagatctgctgctgaggttttattacttgttgttaacatgtgtacacagtcatgtatgaatttaactatctaatctgaagtgttaaaacaatatgcagcttagttaagaagttttagaagttattttgcaaaccttcacttaatgaactaactagagatgatgtctgtaacgctttgtggcatgacaagtcagatctcttagtttgttgaggaaaggaggttaagaatgactcaaatatcaataggggaaggcggtgtgtgagagaaatatcagagtggtaaagctgatagcttaatgtacttggaattttgtgagaaaagtaccttagagacagcagtataattccagaagaagttcattagaaatagcaaaaaaataatcaggaataaagattgaagggagaggagaagatggtatcagacaacaaagcagctaagcatggtttggtattatatgtaagaacctaggatccaatttatttaggttataactggagtgggtaaatatacttatattaatcaatttgaagatttatgagcaatcttatgttctttggtgcttacatgtggtatcatatgcag

SEQ ID NO: 1106 - DNA, 152 bp, Solanum tuberosum
  source 1..152: mol_type = genomic DNA
gtcctctccatttctttaagttttcttgaataatgttaatatgtacatctttcatctgtcttttcatatctttaagaaatgagtgaatcataccgtcaattagttttttctcatcccataatgtatcctgaattatttgtgtgtttaatagc

SEQ ID NO: 1107 - DNA, 92 bp, Solanum tuberosum
  source 1..92: mol_type = genomic DNA
gtacacattctgcaccttattcaattgtgccctcattttgaacttgtgatgtaactcttgagagttctactattttgtttttctttaccagt

SEQ ID NO: 1108 - DNA, 161 bp, Solanum tuberosum
  source 1..161: mol_type = genomic DNA
gtattggcacatttacaactcctccattttgtaatggctcaagcctaactataaaggtattgggggccagagcagacaatacctcgtcagttgaaccgtttgacccttgtatgattttgtttctcttatcaatgtaatgagttttctaacttctaatcagg

SEQ ID NO: 1109 - DNA, 1618 bp, Solanum tuberosum
  source 1..1618: mol_type = genomic DNA
ggtattttattttattttacttttcttaactgtaaaataggaaccccatccaaaaaaaaaggttcaaatttggagttttctagttattttacctcaatttgcgtgaaagtttggagctttgtaatggttatactgtatctgttactcttttcttgaatttggttgtgtataggcaaagtataagaaaaccccatatgaaaagagctgcaagattggaactttctgctatttacttgttaattttgcctcaatttgtgtattttttttgtgggggtggggtgttatggtggtaatgatgtagttaatgttttttgtaactttgagaatgaagtacaggaaaacccatatgaatttagcttcaagattggaactttttcgctttctgctatttgctagttatttgtggattttttgtaatggtgatactgtatctgttactcttttcttgattttggttgtgtatagacaaagtacaagaataccccataagaaaagagctgcgagattggaactttctgctatttacttgttatatttgccccaatttgtgtatttttttttgtggggtggtgttggtggtggtagtggtggtggtgggggggtgggggtgtaagatggtaatgatgtagttaatgctttttgtaactttgggaatgaagtacaagaaaacaccataaggaaagagcttcaagattgaaactttctgttgtttacttgttaattgcttcaaacttgtgtagattttttgggtttttaagatggtaaacttttggaatgaagtaaaagaaaaaaccacaaggaaagagcttcaagattgaaactttctgctatttacttgttaattgctccaaacttgtgtagattttttgggtttttaagatggtaatgatgtagttaatggtttttgtaactttgggaatgaagtacaagaaaaccccacaaggaaagagcttcaagattgaaactttctgctatttacttgttaattgctccaattttgtgtgcatttttgggatttttaagatggtaatgatgtagttaatgctttctgtaactttgagaatgaagtaaaagaataaaccataaggaaagagcttcaaggttgaaactttctgctatttacttgttaattgctccaattttgtgtggattttttgggtttttaagatggtaatgatgtagttaatggtttttgtaactttgggaatgaagtacaaaaaaaccccataagaaaagagcttcaagattggaactttctggtatttacttgtttttccaatttctgtgatttttttttttgggttttaagatggtgatgaagtagttaaggctttttgtaactttgggaatgaagtacaagaaaaccccacaaggaaagagcttcaagattgaaactttctgctatttacttgttattttgccccaattttatgtgaattttttttgggttttaagatgataatgatatagttaatgctttttgtaactttgggaatgaagaacaagaaaaccttatgaggaaaaagcttcaagattggaacgttgtgtattttttgggtatttaagatggtaatggtatagttaatactttttgtaaatttgggaatgtatggtttag

SEQ ID NO: 1110 - DNA, 685 bp, Solanum tuberosum
  source 1..685: mol_type = genomic DNA
ggtgagtttttgatattctttaaaaaacaaatcagaatttctgaaatttatttatttttggggggatagtaccaaatttccgtagaaattagtgaatggtttttgagtatgcaaactactgtagttagtaatgcacatgacaagaaaatgatttgaagaattgcatattggatgagctgtaatgtcagcttgaaaagctttactcctttgcttaggaataataactgagagagcctggaaaactcactttcaaatcctagttacaacctttagtgtaagcccatttcctccaggttggtgggcatgattagtataaccttggaaacatgtgcttgtggacgcaacatatggattagtctagatgcacacaagctggtccagaaaccatcaatattaaaattgaagaaggaatagcaactaagtgaatatgtccttggtggcattgctttctgtaattcggcatatctagttatgaagcataaacaggatcctcaaggattagtaattggcttggtcttatggggttaaagaaaagtcttgaaatatagagaaaatagtaagtcattggtgctggatgctagatttggcttttttgtttttaactgcaacatcaagttagtgtcttttctgtgtattggtatggaaatgtaatttaatatatatattgctgcctttgtgtcaacag

SEQ ID NO: 1111 - DNA, 1561 bp, Solanum tuberosum
  source 1..1561: mol_type = genomic DNA
ggtatctgcattacctttaaacttatcatccttcaacatccatgtatttgaagattctttgctttttctgtcacttagtcttccgttaccagatttagcctacttgtgtagtcactagtcattaggtagtaaacatattacatacttttgtttctatttcctttgagttgtaaagtataagtgagcagatacatgaaggcttgagaatgtgggtatcattgcagtattggtcggaaaaacttagtagtactgttggttttattagtttcgagaaacagatcagggtaattatccagtctgtggttactagggttgataatgcccctcaatgttctgcgttttcttcgtctatttatagttgagcctttttaagctgtacctactacagttaatgctgatttatgaaaaaaaaaaaatgtataaatggggcccttcaaccttgcttcagccatatccctcagggacggcaccacacatgcatccacaaaaagcactaaccttaaatatgagctctagaaaaagagaagggtatctcatgaaaggtttcaagctactggctttcctgaccgaggtaatatttacaaagaaccagtacctgggatggtttatcactttgcttagaggtattagggggcatgtgggtaggtgcaatctccattgatgagaagcatatccacaagaagagtgtaaagaaagatatcaatggttgtagaagcctgattttagctctagtcgactggatgtgcacaagtaaaatattgagaactgcagctaacaagttgtcttgaagacaaaaagaggcgatacctcatttcttcctgttcaatgcacatgtccaccttgtgtttccaccttctttggccatgttcaccactattgccccagatttttttttctcgacatatattcaagagaagagtgtgttctggtggacagcacatctgtacagaacatgataattctcatgaccttgaatactttctattcgtcttcttgcatcttaaaaagttggatctggtcttctacaaggtggatattagcttgcaatgttgtaatatcactgttgcatatatatgctacatattccttcttataattagagacttcatcatttgagtttagaagtattgtaatatgagagctcattgtaacacaattttgcttttgagaaaatttgagcagtaggataaatatctttagcactcatcactactaagggttggtacccttttgatgcttacattttaaaaataaatgggcagaaagaaaagaatctcttagcctctattcatatggaatgggcagaccaatgatgctttcttttcttgcctcagatcaaggaactgtgagaattgatttcgctctagttgctatcagaaatatgacttttgcctattttgctataatgaatattcaagttttttttcgtgtgcttcttttcttctaaagttaaactgtttgtattctgttttggaaatgttgctttaattttccttgttttttctctgatctgtgttgatttctcagagttcttccggttgtcttttttatgaccttttag

SEQ ID NO: 1112 - DNA, 838 bp, Solanum tuberosum
  source 1..838: mol_type = genomic DNA
ggtttttgtgcactacatttcagcttacaaggcaccattatatgaagttgatagaaaaccagttggttgtattttaatacatctttaatttctagaacttattctagtttcttaaggtaaacataagctttttttttcaaactgctgaaagaaatccttcatttgatttctctaaaggacattgtggtgtagaacaagccagtgcattactgcctttgaactctcgtttctaattatcttgttccagtaaagaggcttaaaacctccatttgtgagttcttctggtgacccattatggggttgaagactgatctgattttaacattgctaggattgatgtctttcgctgcccttttatgaggtcggagactgatttgattttaaaaattatacgaattgatcttagatattttctctgcttctttctgtggaatagcataagtcatccagttagggttccaaagagtgctgccatgtgcaatactcattttcaggatagaagggaattgaaggaacaagggaagcctatacaggaaagttagaaaagattgagaaaatggggtcttaccatcaatgtgaacgatgatccttgaatattagagaactacatagatatcttaagatagaaactaaaggctgagctttttgcattccactaaacatcttacattaatagcagtaaggggagttgtattttaagatcattgtttattccagtttagtggttttgataaaaaaagttcttgcaggctttcatttattgtcgttatgtcatccttatctagcatgtagaactgtttatgcctgaatgaatctcatttcattttttgtgatttag

SEQ ID NO: 1113 - DNA, 2026 bp, Solanum tuberosum
  source 1..2026: mol_type = genomic DNA
ggtcagttttgttcatctctttgtttagtagaatatgattgacaaatgctcatgttttcctgtatttcttcgggtctattactaaaacttttcttcttgtttggactttggttggttttatctcaaatagttcaattttattgtatgtatttgaaatgcttttattactgacagtccttttctcattcaaattaatgcaactaggaagtgtactattcctttttaatgttccgctattggtattttgtttggcaagctttcaatatttatctactgatacatttgagattggcttgcttttcttttcctctttaaaccctttgccaagcatagtgtaggtggatagtcatcctcaaattctccgatgccttagccttcttttatgtagattatcccgatagcatttctttctatgcttgtaaagtttgggtggggtgggggatgatattaagtattttcccatcaaattgcctaagcgctatgacaatcttgtcagtgaatttcactatagaaaatctactggcccaaatccaatccattggatgtgaatgtatttccactattccttgggagactagaagaggtctggtgagccgatatttagctgttggaccataagtaacacacatcaacaagaatccttcactgaattggcttgtgctttaaatgcttgatggctacagcaactgtttgactaacaccgagtgaaacattaaggaagtgtcaatatctcccttcctcttctcctaactaggaactttgtctattcctgtaatattcttcatcaatgccaacatcgtgatgacaaaacaaaatattgaaatgctaatgagtgccgttgatcagaggggccatttctcccctttgattggtaatattttctccaaggtccaggacacaaatctgcttgtgatcttactatcttctcttaccaaactggtttagatttatagcttgcacattaaaatgacccaaatgactagcgggaagagctgatcgacttgtttatgagttagcattggtaagtcccaaaatggatagcttagaggtcgagacacaggagtctcaactccaacactaaggggtcgtttggttgggaactagttatcccaggattaactatcctgggataacttatcccaccatgtatatgggataacttatcccatcactatgctataaatggtgggataagttattccaaacatgtcaaccaaacaagacatctaaattttatcccacccaggactatttattcttatccctcacaccaaacgagccctaagtgagaacctatatgcttcatccttggtgggataggtttgcatcgacacttgtgtttttggtctgtgaaagactgctaattgtatcagtcaaggagtgtgcaaggttgtctaattaacaaattagaaagagctggttttataaaataataaataacatagctatatcagtgtagtatacttttatcaataacaacaagaacacaacaacaataattgtaacttgaggtagatcagtttggagcatcacattgaagagaagtaaaatttgttcctcctccccatcactaattaagctaacatatatcacaaatgagtgtaaggtgaagaggggaatggatcgagagaccctcaatcagtcagttggcatggatggattggtcatgctcaaattgcctccttccttctgaagtttgcactggccatttgtaaagtctagactctggtgttccttgggtcttgcgggctaacatacatgtgaatgaaacttgtatatggtggagcgtttggagagaaatgctaggtgctttgaagacgaacacattacagaagattgctacgtgtcttttaatttgtggtataaagaacttttttgtagttgaaacagagtcaatattacagttgttagagtccttgtaagtagaccaggatagataactctttggatctttgtaaatttggctaccagcatagcatttgtgctgatgaatataaattaaactttgtgttgcttgtggttgcag

SEQ ID NO: 1114 - DNA, 442 bp, Solanum tuberosum
  source 1..442: mol_type = genomic DNA
ggtatctttcttgtaaatgacagcttaggttctttttgcctctttgccatatttgtgccccttgtcacaataccctaccgctttcatctttccatcataaaagcgacttaggattgtcagcccaagtctttgtgagaactcccaacttagaggaaaatggattgattttgtttttaataaccgagaaatctgtctggagccaaccaccactcctctccatttaaatactagacttagttagcttagcacaaggctcgaacttgtaacctatgatacaagtccctcaaccaatagagaggctgtgctaagaagagcatcctaacacgagagaaggtagtgttaggatgctcttcccgaaacatgaactacctcgttacttctctaattgatcacgatgccataacctacttatagaattttgattttgtgatattctttacag

SEQ ID NO: 1115 - DNA, 90 bp, Zea mays
  source 1..90: mol_type = genomic DNA
gttggttggttatttgcttgtctcgtctcgtcttccatttctgcaaggttgcttggtttgctgactgggatcttatgcccgcctgtcagg

SEQ ID NO: 1116 - DNA, 77 bp, Zea mays
  source 1..77: mol_type = genomic DNA
ggtaagatctctcaccctcccccagtcccacgcatgctcccgctaaaccctaaacccctggagatctccctgtgcag

SEQ ID NO: 1117 - DNA, 999 bp, Zea mays
  source 1..999: mol_type = genomic DNA
ggtgaggcaaatgcttttctgctgcttcggaactctcgccccgttccccgggtgtgggtgtgttggggggcgcagtcgcgcagacacttctgcagtgtccctaagctgaggcaaaatgcgtttccgggatgcactggcgagttggcactttacttttgattgcctgaatcattttaggctgcccactctaaaaaaatggttgctgccatcaaatctaggttcaaacacgagagactaccacttcgcttgggttgatacaggtgtatcctcagttttctttcgattctaggtgggttcagctcagtctgtgaatctcatgagtcagacattagcgtgcacatagattcttctgattaatgtatgcatacttcattcccgagtgacaaagttagttagtgattcagctttatgtttgctgcaagccatgtggtctagcccaaacggtgactagttgtcagtagtaggctatcagctctttgtcgggtattgtgcagatatcttcagtcaagtcatacgatgaatcctaatatctgcatgtgctgggagcttcttgttactctttttttttgtcggcttgcctcctattgattctataggctaaattcagaacctatgaaaatgagtgatagtctaaaggacatcttctgtaccagtacttaaataggaaattattcttgtcttatcttagtttcgaccatgtccacattgtgaggctatcccttgtagctaatggacctaattagttagtactgcattctgggagtaggttgttagctttactatgttgagaagaatgggaagacagtgtatatgtagaaatcacaaatgttaaggatttaccatgttgtacaataaattatgtttttaccagcgtcgataaagaaggttttggagttgagtatttaatgtctaattcagcacatctgtcatggtttatcaattcaattgtgttgtgatctacatataacaaatccttaccgtgcttttcaacatgtttag

SEQ ID NO: 1118 - DNA, 93 bp, Zea mays
  source 1..93: mol_type = genomic DNA
ggttagtatctccacatactcaatattaacttttgatgccattattttgttaaatatgttttattgatgatctttcacctactacccatgcag

SEQ ID NO: 1119 - DNA, 375 bp, Zea mays
  source 1..375: mol_type = genomic DNA
ggtgaattttgttatctatttgatgtgtttctgagaagtttctgctctttagattgtgatgaattggctactggggtcgtattccagggtattatttgaatctgaacattgttaatgctttactcttgctactttctatcgacctggctcggtgtgctggttgtgtatgttgatcatgaaatatcctgctacgtttgctactcagatacaatttgttattttctggcttgattcaattgctggggatgatattatttctctgtaagccaatgttagttaaattaggatcttcaatttctggtgtggttctgtaatatgtataacgtacttatttctttgccttttaatgtccacctgacttgttccacatttcag

SEQ ID NO: 1120 - DNA, 677 bp, Zea mays
  source 1..677: mol_type = genomic DNA
agtatgtggatgctttgtatttaatatgtccgtgttaccaaaactgtgagcagtactactgggttcctatttgttgacagtcaggactgacagttttattaaccaggacctgattttctatctgttattatggatttgactgcaaatattactattgttttgttatgcctttttatatttatatattttgtatatgcaaattgttccttcttgtgctgtctcgtttttgggttttatctctactccacccagtgtttttaaggcgtcgcctaggtgtccaggcgctcggatgattctaggcgccttgcccgcctaggcgttaaggtggtggtcatgtttacttgcttgccttaccaccttaagaacactgacccaccccaaattgcttgggactctaaggctgctgttggtgttttttgggaatagtcctgttggcatatctgtcattcgcttactctactagttgtaatgtcatgctatatcaaggcaggacggttttaacaacctaattttctcctggatatgatttatactaatggatttgtggaatatggatttattataatgtatccaaaattatgtttgtaatgaattgctatgcctatacaatctttccttatgaccccagaaaggcttaatatattcatgtctgactgttgttttgcatgttttcatag

SEQ ID NO: 1121 - DNA, 79 bp, Zea mays
  source 1..79: mol_type = genomic DNA
agtatgcctctgtctgtctgtcatgatcgattcctgttgcaattattttattatttttgatttttgattgtgctatcag

SEQ ID NO: 1122 - DNA, 706 bp, Zea mays
  source 1..706: mol_type = genomic DNA
ggtgatcattttcttcgcttcattccactaagaagatacttttttctcttatgaaacaatagtccgctttgcccatgttagattggtgaatgcatctttttatgctgcctgcttccattggttcctcctctttattcaatatagaatatacaaactatatttttgcttcattagtcagacacagttgcataggtactattagtccatcattcactccatgggaataaaatgatttgagaaactgaaagttgatgctcttgcccttgttttgtgacaagattctataccgttctatgcccttaccatgattgtcatattggtttaacgtgctagagcatgattgagttaatctgtgcttttgagcttttaggtgtagccatctctgttattttataattttggactgtctcaatttttaactctgccatgtgtttttgggatcacttctcgccttagcagccatttagcccatttaaacggtacacgtaggccagccatgcttgttaaccagcagtctagcctgtttagccatctaaataaggtggccaactatttgacgtttttggttgacaattgtttgggactctgttggtgtaacaaataacaatattatcactggttcagtttgttttattcccgatggcttttgggacctcttcatgagaaacatagctggaatatgataatatggctagttttggtgcag

SEQ ID NO: 1123 - DNA, 190 bp, Zea mays
  source 1..190: mol_type = genomic DNA
ggtatgctttacttttcatgtgacaagctgataactatctgtaagaacaaaatgtatgatgcaatactttatgtgtctagttattatttcttttgctttttttcagtcatttgaaaaatgtgaaaaactaattcaccgtcaatcttaaattcttttctgatacatacacaaacacaatttgtgattgcag

SEQ ID NO: 1124 - DNA, 85 bp, Zea mays
  source 1..85: mol_type = genomic DNA
cgtaagcttctcccttgcaacctttcctgtcattttatagaaaatagttttcctgcccgttcactcatttttgttcaatgtccag

SEQ ID NO: 1125 - DNA, 1267 bp, Zea mays
  source 1..1267: mol_type = genomic DNA
ggtgctatttctttgtaaaatatgtttgatatttaaatcttttgtctgatttcttccaagccaagggaaaactcaccatataactgaattgtacccctttcaaaatggcacacccagtgtaggaggctctcacgtgagtgggttgtggggaagggataaaccgaggcaagccttctccccgcaaaagcggagaggctgctttgttcctgtgacctggtgactcattgagatatttctcaccactgcaccaggcctgcttttctgaattgtacccttttattgatacataatattgctttgtcacatgtaagctgatctgctaacatgcttgaaatacttcagaaagacttcaggggcttgcactttgttttttttctggtgtgtgttatatggcactgctgggcttgtattgtattttgttcttaatataatgacaggtcggtctcctgctggttcgagaaaaaaagggaaaatttatgaacttgttttcataactagagatacaagtaatgcaaaaatgagagagccagaagcaaacaaagttttttattttttcgacttcattagcagctcaatttaggtattattcaaattatatggttcagaaaaatcagccttgaattcattcactcgggaacttgtttcgtacctggtaaccagtaactactatgtcagcaaatccaagtaaaagcgttactttgaagtctgggtagacccttttttcttctctgggatatcgcttaaattgtgctgtagtttttttttgcatttgggggcaattacaaattctgcggtgattttcttactgctcgttgcattctgagggtcttaatctgttaatatattatttgtgattattttttcccaccatggacgaaccaaatttcattactcgagcaacgaaattacattagtttgtaaaaccaaaagaaaaacacatcaaatgtaaagaaaatcctagctggaatgaacacaggttcacccagctggtgcaaaacaaccaacatattcaacaagtgttttaaccagtttacaaacgccaccagccaaacagaaacgtccaatctactatttattacaggaccagttctatgctaatgtattatgtcttgttcatttggctgctgtatttgcttatcgttgcccctgtactacaaaaatgtttgcactatacctctttgcaacactcagtgctatcctgtaatgcttttgggattacagccaaacatgtacttttaatgtgagttaatgtttgtccttgtttcag

SEQ ID NO: 1126 - DNA, 86 bp, Zea mays
  source 1..86: mol_type = genomic DNA
ggtatgctcgtttacaaagctttagtttttgctgtacgctgttgaaactttttttatggtttcaatgatgatctgttgtattacag

SEQ ID NO: 1127 - DNA, 210 bp, Zea mays
  source 1..210: mol_type = genomic DNA
ggtatacttttgttgtaactgtaatatttgtgtagcaattatcttgtgttgtttctattataaattcaatattactttgacttcttttgtgtgtaccttgaatgcaacataaactatatttgcttcattggcttacggtttttaaatctttttctttacatttcatgttattttatagcatttaatttcccagctctatttttcatgcag

SEQ ID NO: 1128 - DNA, 457 bp, Zea mays
  source 1..457: mol_type = genomic DNA
agtaagttggactttaactatgagtacctattttttgttatttaatccatccctgtcaagaatatctgtcacttcatcttgtacgcttattcatcacacctaaactattggtgcatctgtgcacgcatctctgtctggcataaaaatggatcatgaggaactcaacttgataattttgataaaaaactagtttatcatgctacaaaataaatttatctcaacatctgatgtattggggtacgagactgaggatcaatatgacaagttctgtttactggtatttgttagccttatctgtcataatacatggaacatttgcaaattggtaggctgatctgacatttgcaaatttatatcaagcatgttgcaattggtagatcatctcataatcttctgttccttttttctttggcatgttctgtttatgggattcttaacttacctgatatttgtgcag

SEQ ID NO: 1129 - DNA, 424 bp, Zea mays
  source 1..424: mol_type = genomic DNA
ggtgagtagcgtggaaaagggtctgtagtacttattggtttgaatgatttgtaggttgtaatcacctaacttgttctggtgctgtttttttactacaccgttttttgtattggatcatgttattgtgcgaaaaagccttatggcttgtttggttgcgtctggatcgaaggggattggagggggattaaatccatccctagtcaaaattgaattgaaggggatttaatcccccttaatacccttcgatccagatgcagccgaacaaggccttagtgggtttctttgttgtttagtgcatgttagcagtggtttagagaatttggtggatgctagcagtggtttagataattgtttgaactcagcagacctgctttatctcaccttatatcttggccttcattcacacaaattttatgaccaacag

SEQ ID NO: 1130 - DNA, 97 bp, Zea mays
  source 1..97: mol_type = genomic DNA
ggtgagttgaacgaagcctatactttgttctgcattgcaggcagcatgttagttcttcatatatagctaaatttgctgattctttgtttctgtccag

SEQ ID NO: 1131 - DNA, 101 bp, Zea mays
  source 1..101: mol_type = genomic DNA
ggtaaatacatgaattccagcatgtgcaagtggcgttagtctcttgtacagaatccttttgctatgttattgtaacatctgcaaacttttattttgtgtag

SEQ ID NO: 1132 - DNA, 12201 bp, Zea mays
  source 1..12201: mol_type = genomic DNA
ggtacaattttttttagctctttaaccactagtacgtacttgtaatatctaggtatgtattgaactgaaactagccctgtttgtttcggcttctggcagtttctggccaccaaaagctgctgcggactgccaaacgctcagcttttcagccagcttctataaaattcgttgggccaaaaaccattcaaaatcaacataaacacataatcggttgagtcgttgtaatagtaggaatccatcactttctagatcctgagccctatgaacaactttattttcctacacatgtaatcgtaatgatactcagattctccccacagtcagattgttatgtatggccaagcctatgttaggcgcaatagggccaaggctgcccaggtggggcccaaggcccaatagctaatagataagctctatctagttagttatacttatccaaagatagtagataaagatcagctctatccagatagttatacttatccaaagttagtagatagacttgagatagctctatatatagatctgtaaactctggaataaagacaagcagaattccaatctattctggcttcccagagggagccaaagtctcctgtgatcttctccccgcgcacaacccagccaggatcacgacggcgccccagcgccgccaccctggtcccaccaaatcccctccctacaatctgcgcaatctgcccagtagaattcgtagctctaccaatctggtatcagagcactcgacgatcatgagttcctccaagtcgccgtcaccgggacagcagccgccgccggcctcaagcccacccgcagcgccggtcgtctccctggccgcggtccctgcgtcgtcggaggccatggcgctcggccctcccggcgcggccatcaaccagcaggccgctcccgcgctcacaccggcccagatcgcggcgtccttggcggatctcagccacgccgtgcgcgatatgcagatcaccatgaacgccatgctgacaggccacctccccttccccaatccacaagccgccaatccaccccagccgccgcacccgtccctgacagcgcagccaccgccagccgcactgcccccacccacgcagccacctgcgccactccctccactcgcccggcaaccaatttcttactagtacggcatgccgatcgaccccgggccttcatccaccgcatcaccgaccacagcccccatccatatgatccgcttcccaccatccccatcccccatcccatcttgggcgcagggcgcgcctacggtttcaccaccagtgtactctgaggcactcccgcgaccggcgctcacgacttccttacccagcagcaccgtcggtgggcctcccgggatgctgttaggaggcggcgacggccccctgttcccaggtcgggggcccttgcgcccccacgtacccgcagcgacaacagcgtggtcaccgtaccacgggctacctcaggacgacgacgtggagaccacagcctacgggggcgctgaggcgcgcgcgcctccacgctactacaaactggattttgccacatacgatggctccgaggatccgctgaactggctaaatcattgcgagcagttcttccaggggcagcgcacgccagcctcggatcgcacgtggctggcctcgtaccatcttaaggggccagcacagacgtggtactatgccctggaacaggacgagggcatgccgtcttgggatcgcttcgccgagttgtgtcgccttcgcttcggtccagcagtgcgcggttctcgccttgcggaactgggacgcctccccttcctgtccacggtctaggagtactcggaccgcttccaggcgttgctgtgtcgagctcgggacgtctcccccatgcagaagacggagctattcgtgggcggccttcccgagtacttgcgggtggacgttgagctgcgcgacccgcaggatctacaaactgccatgtacctggcacgggcgttcgaatggcgcgcggcggcctggcccccattccagcagcgcgggtcgcgaccaccgcaacgggcgcagggctcgggtcgcgtgacaccagcaccgcccggggctctaccgaccggtacgacgacaccaggcgatagtacgactccgacacgcccgtttcgccgattgtccccgggcgagcagcaggagcggcgccggcaggggctctgcttcaactgcgatgaaccctacgttcggggacacgtctgccagcggctgttctacttggaggtcgacgacttcctcgacgaggcgtccggtgagggtggggtcgacccccttgaggagtcggccgccccagacgtcacgggagccaacgcgttggtggtctcgttacacgcgctggcgggcatccggacggacaagacgctgctgctaccagtcaccatcaacggcgagcgactactcgcgctcatggacacagggtcaacccacagcttcctcaacgctgacacaatgagccgcctcgggttagccatggcgggtggcgagcaccttcgagtcacggtggccaacggtgaccgcctaccctgcgccggcatcgcccgcgacgtccccatcatcatcaacgacgagtccttctccatcacgtgcgttgggatgcgcctgggctgctttgacttcatcctcggcgtggacttcctggagacgctgggcaccatccagtggaacttccgagcactgaccctgtcgttccagcgccagggccggcgcatccactggcaaggtgtgcgggccacgcaacagcctgccccgcagcagctggctgtggcagtcgtcgacactgcccaacagcccctcatggacgtccttctgcagcaacatggcgccatcttcgacgagcccacgggactgcccccggcccgcccctacgaccatcgcatccacctgctgcccggtacaactctggtggccgtacgaccgtaccggtacgcacagctgcagaaggacgagctggagcgacagtgtgaggccatgctcacacaaggcatcatacgacccagcacgtcgccgttctccgctccggtgctcttggttcgcaaggcggaccgctcgtggcgtttctgcatcgactaccgcgccctcaacgccaagacgtccaaggacaagttcccgatcccggtggtggacgagctcctcgacgagctccatggagcccgtttcttctccaagctggacctacgctctggctaccaccaggtgcggatgcacaccgatgacatcgccaagacggcgttccgcacccatcatggccactatgagttcctggtcatgccgttcggcctctcgaacgcgcctgctacgttccaggccctgatgaacgacgtactccgcccatatcttcggaagtttgtgcttgtcttcttcgacgatatcctgatctacaatgcatcatgggcggagcacctccagcatgtgggcatcgtcctcaagacattgcaggcaaaccacctccacctgaagcgctccaagtgttccttcggcgccacatcagtggcctatctgggccatgtcatctccgagggcggggtcgccatggatgccgacaaggtcacggcagtggcctcctggccgcccccgcggtctgcacgaggcctccggggcttcttgggactagcagggtactaccggaagttcatcaaagacttcggcctcatcgcagccctgctgacacgtctcttgcgacgagacgcgtttgcctgggacgatgacgcgacaacagccttccacgccctaaagcacgccctaacgacgggtccagtgctccagatgccagacttcgccaagctcttcgtcgtcgactgtgacgcgtcaggtgcagggttcggtgctgtccttcatcagggcgcgggacctctcgcctacttcagcaagccatttgcagcccgccaccttaagttggcggcctacgagagggagctcatcggcctcgtgcaggccgtccgtcactggcgcccgtacttgtgggggcgccacttttctgttcggactgaccactacagtctcaaattcttgctggatcagcgcttgtccacagttcctcagcatcagtggaccagcaagttgttcggtttcgatttctcggtggaatacaggccggggcgcctgaacaccgtggccgacgccctgtcccgccgcgactcggaggctgccgtggaggacacggctatggcagcactggccatctcgggtccaacattctccctgctggacgacatcaggcgggcgctggcagctgcacctgatgggcagcacctcctccagcagctgcgggacggcgtattggctgcgccatggcgcctcgtcgacgggctgctcctgcacggcacacgcatcttcgtgccgaactacgacgacctgcgccaccaggtgctgacactggcgcactcggcaggtcatgagggcatccagaaaaccctccatcgattacgggcagacttctacatgccacatgatcgcgcgctcgtccaggactgggtgcgcacctgcaccacgtgccagcaaaacaagacactggcgcagcagccgggcggcctcctgcaaccccttgaggtgccgtcccaggtgtgggccgacatctccatggacttcatcgaggggctgcccaaggtggcaggcaagtccgtcatcctcacggtggtggatcgcttctccaaatacgcccacttcatcgccctcggccacccctacaccgcgtcgtccgtagcacgggcattcttcgacggcatcgtacgactgcacgggttcccgttgtctattgtcagtgaccgggaccccgtcttcaccgggcacgtgtggcgcgacctcttcaggatggcaggggtgacactaaagatgagcaccgccttccacccacagacggatggacaatcggaggtggtcaacaaaattattgcgatgtatcttcggtgtgtcaccggcgatcgaccgcgggcatgggtggattggctgtcctgggcggagtattgctataatacctcctaccacacagcattgcgtgccactcccttcgaggtggtctatggcagatccccaccgtccatgctaccttacacgccagggacggcacatactgaggccgcagacgacatgctacgctccagagatgagatgctggccgaggtgcgccagcgccttttgcaggcccagcagctcgccaagaagtattacgatgccgggcatcgggaggtccagttccaggtgggcgactgggtgtggctacgcctgctacaccgcacctttcagtccctccatccgcgcgcgaagggaaagctgggacctcgctacgcaggccctttccgtgtccaggaaaggattgggtcggtagcctaccgcctgcagttgccagatggtgctcgcatccatgatgtcttccacgtcagcctgctgaagccgcatcgtggggatcctcctgcaactccggggacgcttgacccagtgatggatggtcggctgcttcctgtgccggtcaaggtgcttcgcgctcaacttaggcggggcgtgtggcaggttctcgtacagtggcgtggactggctgaagatgacgccacatgggaaaagcttgaagagttccgtgctgcttaccccaacttacagctcgaggacgagctgtttgagaaggcggggagagatgttatgtatggccaagcctatgttaggcgcaatagggccaaggctgcccaggtggggcccaaggcccaatagctaatagataagctctatctagttagttatacttatccaaagatagtagataaagatcagctctatccagatagttatacttatccaaagttagtagatagacttgagatagctctatatatagatctgtaaactctggaataaagacaagcagaattccaatctattctggcttcccagagggagccagagtctcctgtgatcttctccctgcgcacaacccagccaggatcacgacggcgccccagcgccgccaccctggtcccaccaaatcccctccctacaatctgcgcaatctgcccggtagaatccgtagctctaccatgatggaataagtcatgtggtcagcagcagttgcagttttgactgctgcaggacagcagtagcagcagtcttttgactgcgcagcagcagcaaccttttgactgctgcaggacagcagcagttacagcaggacagcatgcagctgcagttttttgactgcgcaggacagcagtagcagcacagcagttttgactgcactttagtatctaaaggacagcacctgtgtgctgcagcgtgtagtgtagtgtgtagtgcagtgtagtgcagcccctagggctataaatatgtgtccccaacccctctaagggtatggcattgtgtagtgtttgaagaaataaacagaaaattgccccaactcatagtgtcatcctctgatgagagttagagtccctctacttacaattggtatcagagccaaactatcctgcagcctaaacatctcgtgctcatctccttcccgtgcctctccccacactcagtcggtagcaagagctccaactgttccttcctcccctgctcagacgagcagcctttcgtctgagacagcctcttccacacgcagcgacccctcactagcccaccatgtccctacgctcggccacttcgagtgcgcggcgccagcaggaggccgaggtcgccgcggcacaagaacgcgagcgagcagcagcagcggctgcagcgacagcggcgagggcagcacggttggcggcggcggaactggcagcggcgagagcggaagtagaagcagcggaggcggcggatgctgcacgtgcggcggcaacagagctcgaggttctgcgcggcagtagagctggcagctctgcttctgtcgacgacaacaccgacgacgagctcaggctggcgagggaagcagcgcgagagcaggcggcacagtgggcagccgcgcatccccatgggggcgcgcgtggcggcagcccggataggcgccgacacgctgacggcgctccaggcgggggcgcacgcggcggcagcccagacgggcgtagacgcgccggcggtgctcccggcggcggcgaccgagtcgacggagatcgcggcctctacaggcggcgcggttctccctccccggatcggtaccatggtcgccgcatggcccaggccattgtcagggacatcggtcccggcggtgggtggcctaccctcaccaagaccaactacgtcgagtgggccgcggtgatgagggtacggctccaggttcgccacatgtgggaagcagttcgttacgacgacgtcgactaccacgaggatcggcgggcgctggatgccctcattgctgcagtcccgcccgagatgcagttttcgctttcccagaagcggactgccaaggaggcctgggacgccatcgctgcgacccgcatcggcagcgatcgtgcccgcaagaccacactgcaggcacttcgcaaggagtgggagaacctggccttcaagccaggtgaggatgttgatgactttgctctccgcctcaacactctgttgcagaagatggtgcagttcggcgatgacacctacgatgaggagagagctgttgagaagctcttccgttgcatccccgagaagtacaggcagattgctcgctcgatcgagtctctgctagacctctccacgatgacgatcgaagaggcgattggtcgcctcaaggtggtcgacgacgacgaaccacatgctctctctgggcctatcactatcggcgggaagctacatctcactcgggagcagtgggaggcctgccagggtgacaagaagaagggggagtcctcctcctcgacacgaggccgcaaacgcggcaagccgcgcaagccgcgtggaggcgcccaggccggggcgcgaggacatgctgagggtggtgcacgtggaggtgcccaaggcggcgccgtcggcaacaagaagccggcacgagacgacggctgccacaactgcggcaagcttggccattgggccagggattgtcggcagccacgacgtggccaggccaacgtcgcacaggcggaggcggaggaggaggccctgctcctggcacatgcaagcatcgagccatctccagcggcaccggccgcagcggcactcctccaccttgatgagtcgaaagcacgcgctttcctcggcgacggctccaacaaggacatgatcgaaggatggtgcctcgacaccggcgccactcatcacatgaccggccgacgggagttcttcaccgagcttgactctagcgtccgaggctccgtcaagtttggggacgcctccggcgtagagatcaagggcgccggctcagtcgtcttcaccgccgcgtctggtgagcacaggctgctcaccggagtctactacatccccgcgttgaggaactctatcatcagcttgggacagctggatgagaacggttcgcgcgtggaggttgagcacggagtcatgaggatctgggatccctctcgtcgccttcttgccaaggtacgcaggagtgcaaatcggctttacatcctcaatgtgaaggtggcacaaccttgctgccttgctgctcgtcgagacgacggggcatggcagtggcacgagcgcttcgggcaccttaacttcgaggccctgaagcggctcagtgccaaggagatggtacgaggcctgccgtgccttgaccatgtggagcaattctgcgatgtctgcgtgttgacaaagcagagacgactcccctttccccagcagtcgagcttccgagccaaggagaggctcgagctcgtgcatggggacttgtgtggcccggtgacaccagccacaccaggaggacgacgctacttcttgctgctcgtcgacgatctctcccgctacatgtgggtgatgatccttggcagcaagggagaggctgcgaacgccatcaggcgtgtgcaggtcgctgcggaggcggagtgcggccgcaagctgcgcgtgctgcgcaccgacaacggcggcgaattcacggcggctgagttcgcgtcgtactgcgcggatgagggcgttcaacgccactactccgcgccgtacagcccgcagcagaacggcgtcgtcgagcggcgcaaccagacggttgtggggatggctcgggctctcctcaagcagagaggaatgccagctgtcttctggggagaggcggtggtgacagcggtttacatcctcaaccgctcgcccaccaaggctctcaacgggatgacaccgtacgaggcttggcatgggcgcaagccggcggtctctcacctacgggtcttcggctgcctcgcgttcaccaaggagcttggccacatcagcaagctcgacgataggagcaccccgggggtgttcattggctacgcggagggctcgaaggcctaccgcatccttgacccaagaacacagcgtgtgcgcacggcgcgcgacgtagtgttcgacgaagggcgaggatgggcgtgggacaaggcggtggacgacggcacgactccgacgtacgacttcaccatcgagtacgtccactttgagggagctgggggagtaggcaactcttctccgagcaggtctaccccagcccccaagtctccaccgactccagcgccacactctccagctcctgctacaacgagctcttcaccaccacgcactccagccacgactccggctacagcgagctcttcgccaccacgtactccagcaccggcggtaccctctccgggaacgtcctctccgacaccagctcgtgtcgagcacgacccagtggagctcgtgacccctctgtcccgcgacgaggagcgcgtcgacgcgtgctacgacggcgagccgttgcggtatcgaagggtggagggccttctcatcgacccatcggtgccaggccctgcatctcgcattctggcaggagagttgcatcttgcatgcgacgatggtgagcctcggtctttcgcggaggccgagaaacatgcggcttggcgtgccgcgatgcagtcggagatggacgcggttgagacgaaccgcacttgggagctcgctgatctccctcatggtcatcgcgcgatcacccttaagtgggtgttcaaactgaagagggatgaagccggcgccatcgtcaagcataaggctcgcttggtggcacgcggtttcttgcagcaggaggggatcgacttcgacgatgccttcgcccctgtagcacggatggaatccgtgcgactcctcgcgttggcagccctgaagggctggcatgttcatcacatggatgtcaagtcggcgtttcttaacggcgacttaaaggaggaggtctacgtacaccagccgccaggttttgcgatccctggcaaggagggcaaggtgttgcgtctgcgcaaggctctctacggcttgcgacaggcaccaagggcgtggaatgccaagctggattccacgctcaagaggatgggcttcatgccaagcccgcacgaggcggccatctatcggcggggcaatggaggaagtgccctgctggtgggtgtctacgtcgacgacttggtgatcaccggcgccaaggatgcagaggtggcagcgttcaaggaagagatgaaggccaccttccaaatgagtgacctggggcatctctccttctatctggggattgaggtgcaccagggagactccgggatcacacttcgccagaccgcctacgccaagcgcattgttgagctggctgggctcaccgactgcaacccagccctcactccgatggaggagaggctgaagctgagtcgcgacagcacgacggaggaggtggatgctacacagtaccggcgtcttgtggggagccttcgctacctcgtccacacacggcctgacttggcatactccgtcggctacgttagtcggtttctgcagcgaccgacgacggagcatgagcaggctgtgaagaggatcatccgctatgttgcggggactctcgaccacggtctctactacccgaggtgccctggggaggcacaccttgtcgggtacagcgatagcgaccacgccggcgacatcgacaccagcaagagcacaagcgggatcctcttcttcctcggcaagtgccccatcagctggcagtcagtcaagcagcaggtggtggccatgtccagctgcgaggccgagtacatagcggcgtccactgcttcgactcaggcgctctggctggctcgcctgctcggtgatctcctcgggagagacactggagcggtggaactcagggtggacagccagtccgctctggcattggccaagaaccccgtgttccatgaacggagcaagcacatccggctgagatatcacttcatccgagactgcttggcagaagggagcgtcaaggcgcgttacatcaacaccaaggatcagcttgcagacctgctcaccaagccccttgggaagatcaagtttgttgagctttgctccaggtccgggatggcccaactttcccacaagacgacgcacaagacttagggggagaatgatggaataagtcatgtggtcagcagcagttgcagttttgactgctgcaggacagcagtagcagcagtcttttgactgcgcagcagcagcaaccttttgactgctgcaggacagcagcagttacagcaggacagcatgcagctgcagttttttgactgcgcaggacagcagtagcagcacagcagttttgactgcactttagtatctaaaggacagcacctgtgtgctgcagcgtgtagtgtagtgtgtagtgcagtgtagtgcagcccctagggctataaatatgtgtccccaacccctctaagggtatgacattgtgtagtgtttgaagaaataaacagaaaattgccccaactcatagtgtcatcctctgatgagagttagagtccctctacttacataccacagattcttcccacagccagattttcagaaaagctggtcagaaaaaagctgaaccaaacaggccataaaaggtgctttaaaattctcatttcaatataatttaataattcccactatgaaactattacaaatgaaatggtgggagtattttagattgttttgtacatattttccgtattttgcgaccttagttgatattgataactatgaaacaattctctttgttcatgttggttagaaatggtgaagtcgctctttactcatttttaatgctagctattattaccacattgaattattacag

SEQ ID NO: 1133 - DNA, 83 bp, Zea mays
  source 1..83: mol_type = genomic DNA
ggtcagactagaatatttatttattaggttattgctggcacttacaaatgacatggctgaattgttggagaattgacatgcag

SEQ ID NO: 1134 - DNA, 85 bp, Zea mays
  source 1..85: mol_type = genomic DNA
agtaagctcgatatttgataggccctctgttttttctatacttgccctggacacctgatgaggcgtgccatgtgtctcgcgccag

SEQ ID NO: 1135 - DNA, 93 bp, Zea mays
  source 1..93: mol_type = genomic DNA
ggtacgcgagcgcgccagcccatcttttggtagcaatagtattactagcatgtagcgcaggcgctaagaggctgtgtttgttccattccatag

SEQ ID NO: 1136 - DNA, 2451 bp, Zea mays
  source 1..2451: mol_type = genomic DNA
agtaagttaccacctacgccttcgccttcgcctttttaacacttctgtgaccccgaatggaaaagtttgctaatattattgttcgaaaacgttatatcgaattatagcgacgagggttatttcacttatttgtagtaactttgcatcgaatgtggaattgataaccacacgtgcatttacttctgcaggaaccaatgtaggaaagatattttttttcgaactgataggattccacaattgcattacgaaattaacgtcagagaccagctagctacccttgccaccacaagacacctgaatcctaagaatcacaagagatagtagcaacgcaacagaaggtctaaaccatcataagtctttccaaaaacagtacaactgctagaacttgcgagacaaccaccagatcgcaaaacgactgagggcttttaaatgtccatgtatccacttagatccttgtgggttggattggtgtggtttggattttaacctaaacactccaacccatgtggattgaggtgaatacgtgtgcatccaaacaaggcctaaaagaacaatagtatcagcccagaactgtcagttcttctgattatatccatcgttgtcctgcagcaactgttgtccgtttctttctaaggagcctcaccacaatctttagcgttgtgttgacgccttcaaaagccatcttgtcacaacaagtcggtaggctagagttaaatccaatagaaaccatctgtcaaggttcagccatatggatagctgtcatgggcatcatagggagcgagaggcaacatccaggctgggataaggctagagaataagattgagatgagctgggataaggctagagaataagattaagatgagagaattgtggagagttggttagcagcagataagatcattatcaaaccaatctctctctctcaagcgcctaggcctgctaccctagaaccaagcctgcggcagaggggtataacctcgccggagaagacagctatcccatggaccgaaggtccatgacacctggtatcagctccaggttatcctcaccaccaccagccgcccatccctcaccaccaccagccgccgcaacgccctcccacccgccctctccaactccagatgcattcactcggctcgaagagagttttggccgtctcgcagagaagtgggatcagttcgttgtgatgttccaccgctacaaggagaagacagagaaggaactccaagcagcggtgcggcttcaggcggcagcgcgagggttcctggcacgccgccaggtacagtcccttcgtggggagaagcaccttgctgtggcctccagggccatcccatggccgtcatcacatgagcaggctgtggtgcgcttgcaagccgcagtgcgcggcttccttgttaggcgggcggtgcggaagctgcacttgctgatcagctcatcgctgcaccaactcgcagcctgctcgcccaaccaccaggtctcgtctatactttttgaaccccctgcagaagtcgagatctgggtatgcagcccccctgcacggccaaagagggtcatctccttcattcgggcaactaccttggtgctggacagacccaacataagaacgggctggttcctccttcacctttcatccaacgtaaagtccgcagttcagctctttccttgggatccaggaggacatagctgcagttcaaatttatattttagttccacaattattttgtattttcgtcttaaataataaaggtaagccgagatgtaaaaggcttaaccttaagtcgtgtcaggtaagtctatggcagctcaaggacgagctggtcctcaagggagggggagatgtcatgggcatcatagggagcgagaggcaacatcgaggctgggataaggctagagaataagattgagatgagctgggataaggctagagaataagattgagatgagagaattgtggagagttggttagcagcagataagtccaagaaagtaggggttagttgagagtttgtaggagaagttggttagccatagggctatttataagccgcatgacagcagggaataaatcaagcaagatcattatcaaaccaatctctctctctcaagcgcctagggctgctaccctagaaccaagcctgcggcagaggggtataacttcgccggagaagacagctatccccatggaccgaaggtccatgacaatagcatttttccatatactcttattcaagactaaatctttgggtatatttcaccctttccttttagccttcccatgcatctctcattacaccttagtgccttgggatcttttcccatgaacgcacatgcatataaaaaaggaacatattaggtgcacatagaactttggtgcatatattaaatcatgatcatgaccatccattttagatccaacgtcctctcacaccctccctttgtgcacagctcag

SEQ ID NO: 1137 - DNA, 2588 bp, Zea mays
  source 1..2588: mol_type = genomic DNA
ggtacactttttatgttccctgtaaaaaatagtagcagggtcttgtactgttgtacatatttgtcttcaaagcttagtttgttttgagtttttcatactgtccagcaaatagcagcaatccctacagcatggaacttatttttccagatgggagccatttttgaacccataaccaacattgttcaaaagatctaggtgcatttgtagcaccattgcagtttgcattaattgcccagctacactacactggaacaaaagatgagaaagagattcattacaaatgtaaaagtagcaggtagggtcaccaagccacttctaatcatattagcattgtcaaaattccattattcagcgttagctagagatatttttcttttagctggaattttcctttcgatattttcttatgaaatggacttgtttcatttgaattcagcacatcgtaaactgatttgacacttaagtgtccctaacagccaaacctccatgctatctcatcatcaccctccccattggcacatttgcaacatctgctaggatttttcatctcaatctccattcatccaccagccatcttgtgaatcttaatcatatgagggttagatttcatattatatacacttagggggtgtttgttagggattataatcataatccctaacaaacaccccttatacagttatatcttgttaacatgctttaagcagttcaagatgcaactgataaagaggtttgtcataaagaaagatatcgttccagaagagagcttttgtccattttaatggaaagtttcctcctttgcaagtatatatctttgacctccagtagatctgagtcatctgaccaaatgggtgggtcagtttgcctatgtttctcagtgtaaatcgtcccatccttatgtctttgataccaagacctcctttttctagctcttacagattttggaccatctgatcatcagacaatacttattttttattaacaccacctttccaaaagaaagttgttctaattttctcaatggtattcacaattgtttttggtaactaatgctagtaggaagtggataattttgcaaacagaatttaacttcagcattagcagaagcttgatatgtaattctgcgattgcactagctgaggtatattgtagttttccatttttaggtttccactgtgcacgcgttgttaacatgagaccaccaaagatccttcaagtaaacatgcagaaactccactcgtttttctctctcaaagaaacacgatttgtttctagtgtattaaagcattttgtcaccggaccagcattgcttcatttctaacactggagaaatcattgaacagcctgattgttttgttttctcatctttgtttttgttgccatcttacctttgggataaccaattacgggcttgatgatgacttcttgctttaaccacactgaaactgaagactggaggaggtgtatttctctctcttcctttgctgctcctctctctcggcggcaccttgtgaaatctctttcttttggtgaagaactaagtctatctccagcagccttactagtgcaaaacgtcatatgcacgatctgctggccacaccctaatgtcgaaattattctttccttagcactgctcttcaccaaaagaattagatggaaggatttggcgagactgaagagcactgttggaagggagtgagaaagatcacatctgatggatcttctcatgtggaaaaactttggcctttgtactgagagcaccaaagtaattttgatccttgctttgctgtaacatttattagtattgccattttgttgtttgactttactgtgcactttaccctggacctggttctttttgttcatttgcatggagttaatactctgacttgccagtttatgttcctgactattgtacaaatccgattccctgcccgcttgccattttacatgcaaccaaagctaagccacagctggtctgttgcattatgtgaggtgattttgctcattcacattttgtgttttatgggtacattttattacttgggcctgttattttattacttgggcctgttttggttattggtctttatgtggaagtgttcttttttctgaggaaaatgatgacacgagtgaatagtgataatcaattagacgccggaagtgaacttatgagctgagtcttcaggcctaatcatgtctgatttgccaatttacttgccattttccatgttagtgctagtttgacaactccattttcctaagtgagggaaaatgagctaatttccctttgagaaagccatagaacccctgcttcacccatacagtaggctaaaccctaaaccctaaaaccctaggcccaatttttagacctgtgctttgtcgtgggattgatgaggggattttttaatcctaaattaaaatttgctgagtcgaatttagacataaggagcgctactcatatcacataatcaactcagttagagtccctttctactcatattacataaccatctcagttagagtcccttatggtatcaggaagctctttttggtcattgtcctcatgttctaccctttctctacag

SEQ ID NO: 1138 - DNA, 131 bp, Zea mays
  source 1..131: mol_type = genomic DNA
ggttagtgttattgcattggaaagtatcgcgcttgtatgtatgtaggctagcatctttctttgtcctgccatttgtaaagcattgaagcccaacaaagttaacgaactgtatcttgcttttctccttgcag

SEQ ID NO: 1139 - DNA, 93 bp, Zea mays; identical to SEQ ID NO: 1135
  source 1..93: mol_type = genomic DNA

SEQ ID NO: 1140 - DNA, 3797 bp, Zea mays
  source 1..3797: mol_type = genomic DNA
agtaagtcaccacctacgccttcacctttttaacacttctgtcaccccgaatggaaagtttgctaatattatggaacaattggatctataccattaaaagatccaaactttagatatataccatggaccccacatgtcattgactcatgtggacccacatgtaagtgagatagtaatggtatggatccaaagtggtgatcttttaatgatatggatccaaatttccctaatattattgttcgaaaacgtcatctcgaattatagcgacgaggattatttgtggtaactttgcatcgaatgtggaattgataaccacacgtgcatttacttctgcaggaactaatgtaggaaagatatttttttcgaactgagaggattccacatttgaattacgaaattaacgtcagagaccagctagctatccttaccaccacaagacgcctgaatcctaagaatcacaagagagagtagtaacgtaacagaaggtctaagagtgtgtttggtttgacttttggctttggcttttgcccccctaaaagccaaaagctaaccaaagggctggatccagaaagcagctttttctaaaagccggctttctcgtagtgcaaatctgaaagcacccctggacctgcttttagtggcttttcggatggaactgtgaaaacatatatcgaagaatttttaacgacttttagtggtttccaccaaacggtttttagctttttaacagctcacaacctacagcagcttttttcacagctcacagcccacaacaacttttttcacagccacagcccaaccaaacagaccctaaaccatcataagtctttccaaaaacagtacaactgctagaacttgcaagacaaccaccagatcgcaaaacaactgagggcttttaaatgtgcatgtatccacttcgatccatgtgggttggattggtttggtgtgggttttaaactaaccactacaacccatgtggattgaggtgaatatgtgtaccaaaacaaggcctaaaagaacatcaatcagcatcagcccagaactttgtcagttcttctgattatatccatccttgtcctgcggcaactgttgttcgcttcttgctaaggagcctcaccacaatatttagcattttattgacgccttcaaccagagccatcttgtcacaacaagtcggggtaggctagagttgaaacccaacagataccgaaacccaacagaaaccatctgtcaaggttcagccacatggataactgttttccatatattcttattcaagactaagtgcagctaacttgccacactttgactaactttttttgcctaatgttagttattcagggcctgtttggttcgtggctaactacgccacactttgcctaatgttagtcgtttaaattgaagaactaaccttaggcagaaaagttaggcaaagtgtggcaagttaggcagggacccaaacatgccctcaattcgaacgactaaccttagtcaaagtgtggcacagttagacacgaactaaacagaccctaaatctttgggtatattccaccctttccttttatccttcccatgcatcactcattacacattagtgccttgggatcttttcccatgaacgcgcatgcatataaaaaaggaacatattaggtgctcatagaactttggtgcatatattaaatcaagatcaagaccatccattttagatccaacgtcctctcacaacctccctttgttcacagatcagggtagaagtggtgtagagtgtttttgcaaaaatatacagtgtagcgagaggactgttggggagggtgttggatccagaatgaattgtcgcaatttaatatctgtaccatgtgcaccaaaggtgtcgcaggtacactttttatgttccctgtaaaaaatagtagcagggtcacatatttgtcttcaaagcttagtttgtcatttgtttttcatattgtccagcaaatagcagcaatccctacagcatggaaccttttttccagatgggagccatttttgaacccataaccaacattgttcaaaatatctaggtacatttgtagcaccattgtactttgcattaattgcccagctacactatactggaacaaaagatgagaaacagattcgttacaaatgcaaaagtagcaggtaggatcaccaagccacttctaatcatattagcattgtcaaagttgcattattcagtgttagctagagaaagatttttcttctagctggaattttcctttcaatattttcttatgaaatggactagtttcatttgaattcagaccatcgtaaacagatttgacactgaagtgtccctaacagccaaacctccatgctatctcatcgtcaccctcattggcacatttgcaacatctgctaggatttttcatcccaatctccattcatgcaccagccatcttgtgaatcttaatcatctgaggttagatttcatattatatacactttgcgggtgtttgtttgggattataatctgcccagattatataatccaacaaaatttgaattaagtgttggttcaaaatttgttgtgttatataatctgggcatattataatcccaaacaaacacacccttatacagttatatcttgtttacacgctttaagcagttcaagatgtaactgataaagaggtttgtcataaagaaagatatcgttccagaagagagcttttgtccattttaatggaaagtttcctcctttgcaagtttatatctttgacctccagtagatctgagtcatctggccaaatgggcgagtcagtttgcctatgtttcacagtgcaaaccggcccatccttgatgtcttggataccaagatcccctttttcaagctcttacagattttggtccatctgatcagacaatacttatttttttttattaacaccaccttgccaaaagaaagttctaattttatcaacggcattcacaattgtttttggtaactaatgctagtaggaagtggataattttgcaaacagaatttaacttcagcattagtagaagctttgatatataattctgcgattgcactagctgaggtatattgtagttttccatttttaggtttccaccgtttacgccttgttaacatgagaccgccagagatccttcaagcaaacatgcagaaactccacttgtttttttctctcaaagaaacacgatttgtttctagtatattcaagcattttctcaccggcccagcattgtgttttatgggtacattttattatttgggggcctgttaggtgtattagtacattttattacttgggcctgttttggttattgttctttatgtggaagtgttcttttttctgaggaaaatgatgacacgagtgataatcagttagacgcctgaagtgaacttatgagctgagtcttcaggcctaatcatgtccgatttgccaatttacttgccattttccatgttagggctagtttggtaactccatttttcaagggagggaaaatgatgtaatttccctttgagaaagccatagaatccctgctacacccatacacagactgtaggctatgtgagaacgattggggccaggtcttagacttgtgctttgttgtgggatagacgacgaaaattttttaatcctaaattaaaatttgctcagttgaatttagacatactgagcgccactcataccacagaacccactcatatagaggccctctcgctccatgttatggtatcaggaagctcttttaggtcattgtcctcatgttctaccctttctctacag

SEQ ID NO: 1141 - DNA, 131 bp, Zea mays
  source 1..131: mol_type = genomic DNA
ggttagtgttattgcattggaaagtatcgcgcctgtatgtatgtaggctagcatctttgtttgtcctgccatttgtaaagcattgaagcccaacaaagttaacgagctgtctcttgcttttctccttgcag

SEQ ID NO: 1142 - DNA, 110 bp, Zea mays
  source 1..110: mol_type = genomic DNA
ggtaattgtggccacttggcgtcatattctctgcagattcctttttttcaggcagcttttataatttaattttcagtcgatgttcattattttccccccatctcttatag

SEQ ID NO: 1143 - DNA, 269 bp, Zea mays
  source 1..269: mol_type = genomic DNA
ggtaagtgatcaaataatcagcattttattcatgtacattctttttttttgctgctctggaatcttaatctagtataaactagttgaccaaaggtgaaatatgatattaaaactaaatctgattcaatagaatcttcttcaaaagaacacctgaaccgttttttataattgctgcataaatgatatggggatagaaatggatagaaatattttcctttttatttcactcagttgctcaatgcacattgggattttgttttggttgacag

SEQ ID NO: 1144 - DNA, 92 bp, Zea mays
  source 1..92: mol_type = genomic DNA
ggtaacaccaagttttccggcggctattctgtatctactatctgagtctattttgtgaagttctgacataagttcttgttttccctgtgcag

SEQ ID NO: 1145 - DNA, 160 bp, Zea mays
  source 1..160: mol_type = genomic DNA
agtatgtagtttggttatatatatattgattgtattatttactcgattctatgggttcttggatacctggaatgtgcatgatatttttaaatttttgtaacaatgtgtactccgtaacaaagttcgcgtttgaaacatcgtttctgctgctttaatgtag

SEQ ID NO: 1146 - DNA, 516 bp, Zea mays
  source 1..516: mol_type = genomic DNA
gtaaccgtctctccattcaccctgcctgctgtctcgctagaatcgcctgcctctgccagcgccgtgacgcgggggcgcggtatggctctcccagatccgcctggcattgctcgctcgggtcgtgccaggccgatctgatctcgcatttgctgcgcgctcctcctgctgcggatcccaccggatctcgctggaatcggagcgcgcgtctctttgaaatgccgcagatctgcgtgcttgcgcgcgtgatctaagtccgggcctttcgttaacgaaatggtccgatctgtggtttggtggaggcaatgccatggtttttccccgtgaattttttttgctgattttaggagcttttttctactgtcctatgttagtaggacaaaaaaaaagaaacatagattagcttcaataggcgccttttagaacagattctgtacagcaactcgtggaaacaaatctgcttccttaatgatgttgcttgttttaacaaatgcggcatcgggcgagcttttctgtagg

SEQ ID NO: 1147 - DNA, 77 bp, Zea mays
  source 1..77: mol_type = genomic DNA
gtaagctaccgccgatttgttccctgaactaaacacttattcttcagaatcccctaacaacaccaacttctggcagg

SEQ ID NO: 1148 - DNA, 104 bp, Zea mays
  source 1..104: mol_type = genomic DNA
gtgagctgattcgattcgattctattctccactgaaccgtttccacttggaaattagtgatcttcgctaattttcaaatctcatttgctctcttgcctctcagg

SEQ ID NO: 1149 - DNA, 1374 bp, Zea mays
  source 1..1374: mol_type = genomic DNA
ggtaagtgatactaccatgccctgagaggaagaggtgcttttgccttttgctttttagttttagattagagttgtttcatttcagttgatcctgccctgagagtgagattttacctttcactcttagttttagattatagttcgtttcatttcagttgatcttgatcataccttgccctgagaatgagatttatgtcctaatatgcagcagtaatcttgctagcttgatcggatcctgtactaaccagttcgtgtcagctagtattttccgctcctttgatcaagaggggggaggaggcagtgcttcatgtgtcatacccggataatcggaagcagaaatggatttgatatgcggtggaggcgcttgttactagtcctgggtggctagatctcatctcatggttctggtttcaagtggaaagtccgttactcgtgggaaacgaatgactcgcatagtttttcgttggatgtttttgctcatcgcgtggatagccgtgggcccacaatagtttctgtaaatcttgaggccaggttggtctagatcccatccagtgattattgtgaccttgtgcttggcagcctaactaggtgcttactgagcttttattgggcgaaccttacatagcttttcctagctaataaaaatatgtatattcatgtcaaatactgctaacccgagccagaatctttgtcaggttatcttggtctaaacagctcaatctttcaaccagccagctattgtttttcccccccttcccttttggcataaacaatccagtttataatctcttgctagctggaatcggaatgatgggcgccactactgacttcttgctggcacatggactttaggctcccatcgtctacagctaaatgaagtatccagcataggctggatgtgcagcagcagcaataattctgatccagtacagcttcttcattttgttaggctcagtagcacatgggcgggcaagtgagcatgtctctgcctgacaggacaccttatgccagcttatagctagtatacagagcataattaatccactttatgattgattcagtgttatatgcttttccttcaaagtcgttagtcctatttaccagctggtccttgttcagagattcattgatggtaataatcttgctgcaacctgagttcctgacctagagacaaggcctgctaaatacaaccttgcattccttttacttggctatcacaaactgctcttagttatcattatgtgcctgaaaaccatatggcctttctcttattaacttaaatttccaagccatctagcatgaactaggttaaaaaaattgtgctttaacaagtgaatatttgagatggtctctgaattcagattgtctgtgcag

SEQ ID NO: 1150 - DNA, 98 bp, Zea mays
  source 1..98: mol_type = genomic DNA
ggttcgatgctcgttctatctaccatgttcattcattcatctctgaaacctgtaaaggcagttgttgcagaatgaccagcccatgcttctctctgcag

SEQ ID NO: 1151 - DNA, 117 bp, Zea mays
  source 1..117: mol_type = genomic DNA
ggcacgtgtccactttcacctcttattaaagtttttctaggacaacgtctctgattctcgtcattggtgatctgacgacaccattctactacctatgtctcggtactctgtgtgcag

SEQ ID NO: 1152 - DNA, 264 bp, Zea mays
  source 1..264: mol_type = genomic DNA
ggtacttattaacatgaccctatcgtcttgctgtaacacttatggtcttaccatggagattatatgctttcttgggtgccttattgcttttatcatgtcttccttttttaagtgaaaccatcaatcaatcaaatcgacatgtgcacatgaacacataacaatcataagttgtcgccgtaggtcatggatatgaactgatcacttttaatgtttactgtttcttcacggtataggcttcttactccaataattttgctgttgcag

SEQ ID NO: 1153 - DNA, 328 bp, Zea mays
  source 1..328: mol_type = genomic DNA
ggtaacttctaggtccctttgtctagattatacacgtatactgtgtgtttgagaaatatatttgagccataaatttgttatgcaaatctgaagcataatcgcttagttgtcatcctatctctactcctccttatgtttgtatcgtaggcgtccacattcgaggatggtgcacgattctaatgccttgtctgttctaatgccttttctgttctgatgccttgcctgttgggagtgctctgcctaatgccttgcctattgtccgttctgatgcctgttgtctgttctaatgcctgttctctgcgaactgtctttgtctgtttcggtggag

SEQ ID NO: 1154 - DNA, 223 bp, Zea mays
  source 1..223: mol_type = genomic DNA
ggtaaaatgatcacccccactttagaaattgcaatccctattttgatcctcggatgtgcgccatgcacccctggtccctggatgtattttcaatgaattggctatcctaggctacaagcagaaatggcaagttgaactgagttagaagataactgattattcagcgcggataaatattgtttctaaccaagctttctatcctatatttgcatgttcttcaaag

SEQ ID NO: 1155 - DNA, 978 bp, Zea mays
  source 1..978: mol_type = genomic DNA
ggtttgccttgccttgaatacttcttgacttatgtcatattgagcatttgagctattgagaaacatactaatacagacattgttgatgttgcacttgcatgcctctatgtaataggctaaactaagcagcattgtacaggatactggtacttttgcacttgcactgtctcttcttgctaggtagagtcctaccccatagtctggaactagaagaattctgattttccttttaggaatcaatgtatatttgagctttgtttggtcagaaatgcattgtagaaaaatttagatggtgagatttttatctttgttctcatttttgttcattgtagtataatttttttcagaggttgttctcatttatctataactttttatttttttacgaaaagtcggtgcatgctgattatgcaccaagaaacatcctttcgcagccccattaatcatctccatagcagccatcgacaaaaaacagtccttgaaaatttagaaccttccttcagttaagaaatatgtccgttactgaaatggagaagggttgcacacatagttcaatgaatcaaaaggaaaattgacctgtagagtaatatggttaaataaatgtttgggcaaatccataaacccttcagaagcttgtaaaatcgataagtagctccacataggctactagctgtttgttgtttaaataaataaaacagtgtaaatatgtaatttaatcgtttggcctctgaatgtaggctgtagtttagttgtagttagaccataaccttgccaatgcaatttcacatagaaaattagaatctcctgttgtgcctcctcttttaccactttgtagttctgtttgcttggttttgtgttagttgtgtgtttcttttctagcttgctgagattgacaatcatggaaaactggcatctaatgagatcaacataaatcttctgtcagttttttaattgtgttgttgtatgctttctttccag

SEQ ID NO: 1156 - DNA, 274 bp, Zea mays
  source 1..274: mol_type = genomic DNA
ggtaagctaattatttgacctgaccataagtatgcaaaaacaaatacttgcctttgatcaggaagcatttttcacttgctttcgttaacaaaatggcccgatctgtggtttggtggtcaatgccatgttttttttattactgtcttatgctgggagcaaaatagaaacagagaatagcttcaattgatgccttttagaacggaatctgtagagcaactcatggatactttctgcttgttttaataaacgcggcatcgggcgagctctggtgtag

SEQ ID NO: 1157 - DNA, 90 bp, Zea mays
  source 1..90: mol_type = genomic DNA
ggtaagccaccggtttggtcacatctgttcttgagaatgcaaggttctcggtggctgctggggccctaacaacagcaccaaccttgacag

SEQ ID NO: 1158 - DNA, 89 bp, Zea mays
  source 1..89: mol_type = genomic DNA
ggtgagttgattctgttctctgcttaacaatttccaaatccaattttctcctgcagtccgtaatctctaaaatctgtggcctctcttag

SEQ ID NO: 1159 - DNA, 122 bp, Zea mays
  source 1..122: mol_type = genomic DNA
tgtttgttcaaaagatattattcaaaatttaactgaaagattttattccttgcacaattattgtattgctttctttgttgaatattatttgcttggtgatgggctgctgttgctgctagcag

SEQ ID NO: 1160 - DNA, 80 bp, Zea mays
  source 1..80: mol_type = genomic DNA
ggtttgtagttcttgttcacgctgcttcatgttcagtaacattgttctgttaatttaatcacatcacaaactactggcag

SEQ ID NO: 1161 - DNA, 87 bp, Zea mays
  source 1..87: mol_type = genomic DNA
ggtaatgactcgttcacatggcgaccaaatttcattaggacttacaaattttcccatcttaattatgggttgctgttcatcattcag

SEQ ID NO: 1162 - DNA, 113 bp, Zea mays
  source 1..113: mol_type = genomic DNA
ggttaaaaacttacacctttttttttatttgcagctgcaatggcaaatattgcaacctttcagtagttccagtatcttcttactaaaaacatgctctggtatttatgctacag

SEQ ID NO: 1163 - DNA, 92 bp, Zea mays
  source 1..92: mol_type = genomic DNA
ggtagagtattgtacgcatccatttctgagttcatttttaccccgtttcccctgtcaggctatggctgattcctgtaccttgacgcgtgcag

SEQ ID NO: 1164 - DNA, 2247 bp, Zea mays
  source 1..2247: mol_type = genomic DNA
agtgagctcttttctccaccgcgaaccagtaaaaattgtttgtggtgaatatattcattttttcgacttgtgattacgctaggatacctacatggaacatttttgtatccatgcgttccgttgtaattgtggtaggatgtgcagtcgtcgtgctgccactacagtggagctgtgggttattgactcgccgacctatatgtgtggcattgggttcacccatggctccagagattgacacccacccatactttgtcatctgcctagtccactccagcagttgattttcacgggtgggacatttcccattcctttgcgttcacttgtgactacccattatctttgtttcatagcaatcagtttgtgtccacttgtgacaatccactatctttgtttcaattgcattcagtgcattgggttggcaggagtgatgaaccaattagatgtgcgaagctatcttatgagcgtaacttttgaggcatacattctgtctgacctgccagtccacaacagtgttcgtctgcattctgctaaccttttataagtaacccattattgaatattggtgcactgctgctgctgtgttttcatgaagaagtggtctttgtttcaattgcattcagtgcatctggttagcaggagtgatgaaccaattagatgtgcgaagctatcttatgggcttaacttttgaggcatacattctgtctgacctgccagtccacaacattgttcgtctgcattctgctaaccttttataagtaacccattgttgaatattggtgcactgctgatgctgtgttttcataaagaagcggtctttgtttcaattgcattcagtgcatctggttggcaggagtgatgaaccaattagatgtgcgaagctatcttgtgagcttaacttttgaggcatacattctgtctgacctgccagtccacatcagtgttcgtctgcattctgctaaccttttataagtaacccattgttgaatattggtgcactgctgctgctgtgttttcatgaagaagtggtctttgtttcaattgcattcagtgcatctggttggcaggagtgatgaaccaattagatgtgcgaagctatcttatgagcttaacttttgaggcatacattctgtctgacctgccagtccacaacagtgttcgtctgcattcggctaaccttttataagtaacccattgttgaatattggtgcactgctgatgctgtgttttcataaagaagtggtctttgtttcaattgcattcagtgcatctggttggcaggagtgatgaaccaattagatgtgcgaagctatcttatgagcttaacttttgaggcatacattctgtctgacctgccagtccacaacagtgttcgtctgcattctgctaaccttttataagtaacccattgatgaatattggtgcactgctgatgctgtgttttcgtaaagaagtggcaaggaatgatgaatcaaatagttgtgtgaagtcttttcttcctcctataaaaaagaaaataattgccagagcaagcggccagctgggtgtggtcagcatggctagcttgggactgggagggtcatggagggcatggcccctgctcgcgcggccatggagtgggagctggagtggcaggttggagaggggagggtatcgtcacttccagggtcagtgtcagggagggagagggctgtcaggagcgggagcagatgcaggctttgttggagcagcaagtggcgagcgacgggaagatgaacttgcgagaaggaaaaaagaactgttttatgtgtaataacaagtgggtggtgttcaaccaaaggagtacgacgttgaaccctgcttttggctttctgcatttgaaatggtgaaaatagagcttttcacttttaggtagagacaggaagtagattttagtgtttgaaccaaatagtttataactttttcacagcccgcagcccacatcatttttttcatagccatagctcacaatagcttctttagaagcctcaaccaaacacactgaatcaagtaaatgtgggaagtaagcattacttatgagccatatatttgtctgacctgccaatcatcctgcctttataccacttcaagtttcctggttcttgttttttctcattgctgtgtgtttgatttttttccatggatagtttcttaaatactattaaatttgcatctggaaaatcttataatcattatgaacctagggtaatctaagtcctttatttgatccag

SEQ ID NO: 1165 - DNA, 527 bp, Zea mays
  source 1..527: mol_type = genomic DNA
ggtaaacattgctcttgtgctagattcttgtttgtagtggcttacagtaacaaattgtcatatttttttttagatttgtatataagcaagatggtgcgagtcagctttaggcatgtagctcttgacttttcccttgagtcctagcaaatgtcacaaattcataatgtttggagcatcatctggttttctactcggtatatttgtcaagttagttactttggagaatcaagccgaccaattagatatagtaaaataataacttttgtgatactaggtacaactagaattttttagtatttatatttgatgtcataattctataatttttacctcaacaaagctttaatgccttgtaattagaaatttagtattctgtcgtcagctagttcatttttgaattaaaccgcgacaaatacaaaagatcagagagagtatctaattatgatgtgaacagttgaaaaatcacagtcgatggtttatttgttttgcttgactcttaatgtctcccttgtttctcccattttcag

SEQ ID NO: 1166 - DNA, 790 bp, Zea mays
  source 1..790: mol_type = genomic DNA
ggtatagccgtatttctcccttgctctggcaccgattttgttccgaggaagtgatcggctgtaggctttcgtttcgatagacccccccgctcgagcttcccgtcgctgctgacttcgatttttttcgtgtccatttttctgttttttgtcatgtttgtctcggctctggagttcggataggcggtgtggtacggttttcaactttaataaactaccgtcatatgtgtagtcgtgtgctctcctatgtgtcatcatgattactatagtacctctgtgatgtttgattggatgctctgttttatgtttatgtgatgaacttcatgtcgagtttggccagttactcagtcagttcataggagcacatatgattcagcatgcaataagatgtgtgctacgccgaacccgtaaattgttttcaggtcactctgtgaagaactggagatgatcttaagcagtgaaaaatcacacgatcacactctcaaacattcagctaaccattttcctcaaccaaattcccctcccccgtgatcctcctagtgtcagccatccctgcggactgcttggaaacttataagtcaattatcagggtttttttacacaaatttgagtatcagtttcttaatcatgagcagttgtgcacattagttttgactgacgactggcatattgcaatggcggcggcggcggcatgcttcttttgtggggtttaccattgcagcggcggcggcatgcttcttttgtggggtttacctgactccatggacactttaacgattaacaccgagtatag

SEQ ID NO: 1167 - DNA, 87 bp, Zea mays
  source 1..87: mol_type = genomic DNA
ggttcgttctcctgtccagcagccaatccttttgcctgtctattcattactgatctaataaactgatgggatcttgatgccaaacag

SEQ ID NO: 1168 - DNA, 88 bp, Zea mays
  source 1..88: mol_type = genomic DNA
ggtacgttacgttgctgcatcgaacctgtttcatgtcagcattcgaatagcagtacgtgtagtgagtggcgacaatctttctgtgcag

SEQ ID NO: 1169 - DNA, 109 bp, Zea mays
  source 1..109: mol_type = genomic DNA
ggttgttagtttgttactgtctcaaaatctaaattcaacgtttctgcttgctttgcagttctagtgtatatgaagtttgatttattaatcttgttattgtgttgtgtag

SEQ ID NO: 1170 - DNA, 470 bp, Zea mays
  source 1..470: mol_type = genomic DNA
gttggttatgaaaatacctcctattgtgctttaccaagtatttgttactgcataatccacaccttcttgattgacattcattgcttttatttatttatttatttatttgaaaatggaacatgtaaagttattgtagtgattgcatgtcctcacaaaggttggctacccctttacattatataagtttttttgaatcattatgtggcttaaaaaagtcagcaatataatttatatataatctgttgtttgtcaaattctggaactcatgattgatggaaggcatttgtagttactagcaatcactgttctcagacctttctctttcttaatataatttacacgcagctctcctgcgtgtttcgagaaaaaaaaattgttccaatctcgtgaccttttttcatttaattcctataaattctgtggtagggcacattgcttctcattaactctggccaatatactttgtcagt

SEQ ID NO: 1171 - DNA, 1340 bp, Zea mays
  source 1..1340: mol_type = genomic DNA
gtacatcatgctctccaatttttttgttgtgattacattcagatgcaaaatttctcatattgttcgtaaatagggccgctatctctggttccgtgctcttaaattaaaggtctattttagcagtataataagcttggtgttgaggtatttttttaccaagcatacatatgtacgtattgtttcaatagggttgctttgcataggaaaaatctaatgattgagttttatggatgccgacatcaagtattgtaaaatgcgataatattaatctggatggctcaattagattgtttattagataagattgtagattggtcagtgtcggtgggaatgctgcctgttgcgttgaaacatgggcaaaagcaggctattttggtgtttgtactggaaaacagtggatatttaaaatcccaggctaaaatgttgttgataaaaaacaagatcaataatgatgcttttgaacactagtaacatctatgaatctctatcctgaatccgctcatgtggtaagtccacaagtgaatgtatattgggtcaaaccccagatatattttgctggattgcttgttattcttaatgctagtattactcttgttttatgtacagagataatgtgtggatggattagcatagctcttactgatttatgttatattaatccattattggtaatggcaatatcttaaaaatgttagccaaccttgtctcaggaaatcaagttttgacccttcaaagtgttagttgcagagcatatattattactagaaattcaatcagtaacactgataacatcagcatacttgttattttggccattcttctagaataaattgaatggtacactattcattattccctttgtttcaaattataagtagttagcttttctaaatatatagtttttgttacggacctagatatatgctatgtctagatacataacaaaagctatgtacctagaaaaaacaatacgggttataatttggaacgttgggagtacatagtatttgaatgccatcctatccttgattattattgtgtgattgggaatgtttacatgaaaatggggaattctcatattaccatggttagtcacccggtgagaaacagcatctgactgcagaaccaccgtgaacataaaccatattcacaattagagctgtactgattggtattagtcctttatgctcccaatattttacttttacttttgaggtattctcttgtggtcccatgtaaaatccggatggattttctcatgcgcatgaattctgtcctgctgatggtatattaccttataaatgctgttattgaatagtgtcatctggcggttatgcagg

SEQ ID NO: 1172 - DNA, 420 bp, Zea mays
  source 1..420: mol_type = genomic DNA
gtattgcctttttattattcattggtcttcaactcatcacaactaggaaaattgtttaatgggaagtgaagtctccctaatgaagttaaacacagctagtaaaattgtttaatgggagttgaagtcctcctaatgaagttaaacatgcctgtatgtaaatactacttttgacctggttggagaatctgtgtaatgttgttttatgtttgcttgtgttgcttaacaatgactgtatataccttttggtcttcagcttctcagttctcaccatgtagattaatttatacatttttttatttcacaaatatatatgtggcaagtttgatataagtatcacttccagcaagaggccatacagtaggcatctatgttaaacaaataaaagattagattcttatgcatctccattacaatttcagg

SEQ ID NO: 1173 - DNA, 845 bp, Zea mays
  source 1..845: mol_type = genomic DNA
gtttattgctatttctgtcatcaaaactacaaatagttttagtttttttgttcccaaactattcatccaaaatggtataatattatggccagtaatcatcttttgagttaccttgaagttatgttcccaaatcccaagcatgatcagcttgaagaatgattttaaattctttaagatttacagtaaaaggacatttaattcccagaaaagtggggagttccaacggaaagaaattagtaagtttgatggttcacacagtgaaattatgttgaattgctaaattgttatcaccagagttcacatcaatgattggatttatagatgtagagttgtgaatgactgtcttgcatacttataaagcatcctttggcatatagatctgctactatttatgaactgagatcatggtttcctcggttcatccacaaaattgaatagttgtcaattgctattattctctggaactgtcttaacctttggcactatttttgttcattacctccttgtagatactgtataaacattggtctctacctccaatgggatactacggtgtgcatcattctacactgttaagtgatatcaataagattttgtagtagttcagaattgttaccttacatcagatgtatgaaattggcactaataaatggctattatcaaatatatcttgaaaaggttattacgtgatggaaattatacgtttgttttgccttgagtttaattttgttggtatttaacctttttgttagaataaacttttaacttgttttcagttggtcatgattttttttaagaagtcagaatttggtgtgcgtctctaatcatctagcaacaaatgcaga

SEQ ID NO: 1174 - DNA, 92 bp, Zea mays
  source 1..92: mol_type = genomic DNA
gtgctttcttcaaactctgcatggatatctaagatgggaagtgatatttgtgaatgcagtgacattttatcagaattctacttttttgcaga

SEQ ID NO: 1175 - DNA, 123 bp, Zea mays
  source 1..123: mol_type = genomic DNA
gtaagtacagatgattgattctcaatccccatttaatgtactgttgtagtcgatagtctacatgtgagtaactttattttctttgtactgtcatttaatttgacatttttccctgtcgtcagc

SEQ ID NO: 1176 - DNA, 235 bp, Zea mays
  source 1..235: mol_type = genomic DNA
gtacgtgccgcttgtcattccaggggcctcgagaaactggcaatcttcagtaatcatgcctgtatttctgctatctgatctgaacttataatgccaataaaacgcggtgaattgcgatgcttgttctttcgtaacactttaaagcagtgttataactgagctatgaatacaattattcctcgtgaattctttttgtgcgaatgaaatctaagtgatctgtcttttctcatgcagt

SEQ ID NO: 1177 - DNA, 592 bp, Zea mays
  source 1..592: mol_type = genomic DNA
gtaagcggtgaaagaagaggaggtgttggaggaattagttccgaatctttctccattacgattttcgtggcgtcgaggttagtctgaagcacgcagttcaacccattcttgcgcacagtagatcagatccgatttgttactgcggcattccgattgctgagctctggttgccgattagttatcaacataagccgcggccaagcagttcttacggggtcacaagaagaagatgaacagtttgtccatcttgcctcgcaaggataaccgcccgctagtgcgtttgtatttgtttgatttctgaaatattcgatttggagtgtcattaactgccctcgtaacgtgttttgactgcagaaactgtgcctgttctgtagatttagatgaatcacagtgttgagacaagattcatctgaatccttttgttaaattagaaaatagagatgatccaaggtcctgtctcagtggatagtggtgtagtgtgtttttgccctgtttcctttgctgaaaatgcagctaataccaaacttgctgtttcctattgagatagatattctgttacttatcctttgtctcctcgtgtttttgttccagc

SEQ ID NO: 1178 - DNA, 90 bp, Zea mays
  source 1..90: mol_type = genomic DNA
gtttgtagttcttgttcatgctggtacttcatattctgcaacctttttctgctaatttaatcacacgttttcttacaaactattggcagg

SEQ ID NO: 1179 - DNA, 85 bp, Zea mays
  source 1..85: mol_type = genomic DNA
gtaatgattctttaacatggtgaccaaatttcattaggacttcccaaatttttccatctcaattatggattgctgttccttcagg

SEQ ID NO: 1180 - DNA, 117 bp, Zea mays
  source 1..117: mol_type = genomic DNA
gttaaaaccttataacacttgttattttccagttgctatggcaaatattccaacctttcggtagttccagtaagctcttggttctaaaaacatgctctcgtatttatatgctacaga

SEQ ID NO: 1181 - DNA, 952 bp, Zea mays
  source 1..952: mol_type = genomic DNA
ggtaacgaaccgtccatttccactcctgttctcgcgttgttgaggtagatctgtacggatctgtaccgtcacatacatgtagatctataatcggtatggggggatttcgtcgttcatgtgtgcctgatttggtgtggctgaatcgcggaagaaatggtatttcagatcgttagatctgtacggatctgcttgtatgtgactgtggctacccagatccccgtttgctatgtctgaaccgtagatccgttagaatggtgtggttacaattgtttttaactggaattttgatacgtagcatctgaatagagatcaccccgaaattgcacattattttccattatcaatctagtagttaggtatcgtaattgttgttggttttgcctatgtgttgtagatctgaacgccctgaagtcgtttaaatgtactgtaaatctggatctgtaaattttaataggccattttcttattcacagcttatatgtcagccttgatacagatacagtgcattgtgcgtttaatgttagtttgatgtacatcatttcgatctgttaatagatccgcaaaaaaaattgtacacattggcgttaggcacgtaatccatttagattttactgtttagatctgttagaaatgggatggaagatgccatgctgtttattaactgtttagatccattttgattttactgtttagatctgttagaaatgggatggaagatgctatactgtttagatctgcaggataaatgttgatgattatttgcatgtttacaatctatgaatagttattcgaaacatggccattggtgcacgcgctgctgccacttttagatcgtgatgatctgtctggtgtactagtggcatgtagtgtttacgcttctaatgcatttgaattatatgttcgacttttgtaagttgcataaataatgcggctatgactgttttctattcag

SEQ ID NO: 1182 - DNA, 95 bp, Zea mays
  source 1..95: mol_type = genomic DNA
agtaagtaatctgatcggatcttaagttggcattgatcccagatattcaatctgtaatgaaaaccatacttaaacttgatttgcttgtcttgcag

SEQ ID NO: 1183 - DNA, 94 bp, Zea mays
  source 1..94: mol_type = genomic DNA
ggtactgtctctgtgtactgtactggctttggattcagtctgatttgtattcttggcttttgtctaaccattggctcttactgatgttgttcag

SEQ ID NO: 1184 - DNA, 455 bp, Zea mays
  source 1..455: mol_type = genomic DNA
ggtaaccgtctctcaccatctctgcagtcaccctagagtccctctctgcctgcccctgccagcgcgggggcgcggtgtggctctcccagatccgcctggcattgctcgctcggggtcgtgccaagccgatccgatctcgcgcttgcgcgctcctgccgcggatccggctggatctcgctggaattggggcgcgcgtttatttgaaatgcagcagatccgcgtgcttgcgcgcgtgatctggcgtcgtcgcgggcctttcgttaacgaaatggcccgatctgtggtttggtggtcaatgccatgtttttttttattattactgtcttatgctgggagaaaaatagaaacagagaatagcttcaattgatgccttttagaacggattctatagagcaactcatggatactttctgcttgttttaacaaaatgtggcatcgggcgagctctggtgtag

SEQ ID NO: 1185 - DNA, 90 bp, Zea mays
  source 1..90: mol_type = genomic DNA
ggtaagccaccggtttggtcacatctgttcttgagaatgcaaggttctcggtggctgctggggccctaacaacaacaccaacctcggcag

SEQ ID NO: 1186 - DNA, 94 bp, Zea mays
  source 1..94: mol_type = genomic DNA
ggtgagctgattccgttctctgcttaacaatttccaaatccgatttgctcctgcagtccgttatctctaatatctgtggcttcccctctctcag

SEQ ID NO: 1187 - DNA, 76 bp, Zea mays
  source 1..76: mol_type = genomic DNA
ggtaaaacaaacaaacaaatttcgcattcgcatttcctcaatcaaggtctgctcacgattttgcttgcgactgcag

SEQ ID NO: 1188 - DNA, 1824 bp, Zea mays
  source 1..1824: mol_type = genomic DNA
ggtatgcacctacacatcaattccacgctaggctagctgttcctttcgtcgatctcgtgtttccgcagtggatcggtcgcgctctgcttcaatcatcaactctgatctcatggtattgcctgcttctgtctcgtaatttagatcgggcatttgagacacaaatgcagaggacatcgattttggtccaaatttgtacgtcacagcagtgttagaatttgtcacgtacattgtgaatctgctgcaatcatcctgcatttgtgcctctaacagccatggatggatgcacgcgattgcttgatccttcgtgaggacaggaataggacaatactaaaacaccctaaaagagaaattagttgcattataaacgaacggaactaatatgccagcttagtagcatgtacaggcaggccttgatgggtaacagattgtccagtacagctgatgtcaatttggtgaatttgttttcttcgaggaaatagatccaaggaaactatttgaatatagagatcattcattgcaaaatgaaagaattcgtaatttgtttgaaatccaaacaacgcctcatttactagcatgacaaactgaaagaccaacatcattttcctttctgatcattcttagtacagtagtgttgttcaactgtttctcccgttgtcccacaagttgcattaattgtccgatttccattgagatggtttagtacttgtttccattcatcttgtgcttatgtgcagttgaatggaattactaatgttataattatttgctatattcgatgagctgtgttattctttgagatcttaattgatcagttgacagttacattcgtgtgtgtcggcgtagctaatttttaaccagaagtaatcatgcggttattacttaaataattcatacacacactgtagttctgaaaagaaggtagattaggcctgtctcatctggttccagtttttctctgcaatctgtactgcaactttgctagtggcaacggggccaagtgttttcaactaaaatatttatcagtgggcacatagaaacatgatcacggccaagcagaagtcattgccacgcatttgttgtcctaccaagctagtgtcccgtttgtgaatgtcagtttcattgctagctgaacatatgtgaaagttagttttgctgaacagcaaaaaattcacaaattgcttcttgtaaatttacaccttcgttttctagagatactggtttcagtactttctgctgccaatgacctggtttgtcggtcagaaaccagttttcaggactgaagcatgttacatcagatgtcaacgtcttcttaggctggtgaaagttcttgagattatcgcaatatacactactaatggcattatcatgctctaattaatcacaactttgtacgaccaaccgaaataaaaaagaaggtatctagatctgctgctactgcaacagtgtcggtggtgcttgcagcgaatgagacactgagacaggctgtacccagtgggctggtggttgggtggattactcatgtgttgcttacttgtttaatgtatatacttgcatgattgcatttggacttatatgaggtgaaatggattttagcgcagcataataaaaaacataaagttagttatacagtgcataacttggcacggtatatgacctgcgggtcatgcttttcgacgggctttgtacatgcatgaccgaactttgttgatgcctaatagtctaagtctgaactctgaaccatataacataactctgactctatgatcacttagtgtctccagaactgaaactgtcggccactaacattgcttgcacatttgatag

SEQ ID NO: 1189 - DNA, 95 bp, Zea mays
  source 1..95: mol_type = genomic DNA
tgtaagcattatctcgttcgctttcatgcatgctgccaaattgccaacgcgcaaacaattgccaacggatgcatttaatccaaatgaatgtgcag

SEQ ID NO: 1190 - DNA, 1204 bp, Zea mays
  source 1..1204: mol_type = genomic DNA
gttggtgacccgtgctccgtgggttgtggatgtttcgatcctgtgtttatgttaaggtggctagtagtgatacactagacctctttataatttttcggtattataatatggcaacaactaatattagcctgtggtaatggagtaatggacgcagacttcttcggtgcaagtgagctctacagggctctttgtgcttagaatttatacaaaggaaatttgtgatcttcatgtttagagtcgtttaatgaccgcggaactgcattggtcctcatttgaaacttccgaaactatggccttattttctttattggttttatagttccatccggctgtaaaaaaattggcgaattctgtgcttctgcagagcagtttaagtttatagacaaatgttgcttcaagatttcttaaatgttagaaatgttatatgactatgtccacaaatcatggagatggaattcttttcaccaaaagggaaaaggtcatgaagtttgtgtattggacattggcacgcatgtgctggattccttgaaccgtctactgtcagatgcatcaaatgccttctgatcagaaaatgctactcaggaaaacctgtagacatcaagtggcattagccgctgcagctgtgtagaaccatagaagtgcagctgagcagggacactgtttttagttgtgacttgtgaggaattcacaacattgttttcagtaattgaccatgtgtttgactaaatcttcaggaactggtgtcattccttgtgctattgcacaaagtgtttgcatgtattggaatttagatgctccagagccagaccaacctaactttttttgtatgtttacaactaatattaaactagttgtttaatatacatggaaaattttaaattaattatttagttgcacaaagggttttattcttgtaagattagcggtttgcccgtttctgataacccataatttgtttttccttgatttctcacaattaccatatcttatgttttggtttcgtgcttgataaatattagtactcaatgggaatatattagcatccttttctgagtcaatagataataatttgttaaggtgctactcatgtcttctgctgggagtaggcacatcagccttttctcccttactgaagtaattagcacatatttgtctacagtcttggtaaatgcttctcctgataaattgttttcattcatgcaga

SEQ ID NO: 1191 - DNA, 103 bp, Zea mays
  source 1..103: mol_type = genomic DNA
gtaactgtagtcgcttggcatcatattctctaatgattcctctttttccatacagcttttagattttcagtcaatgttaagcactttttccatctcttatagg

SEQ ID NO: 1192 - DNA, 442 bp, Zea mays
  source 1..442: mol_type = genomic DNA
gtaagtgatcaaataatcatcattttatttgtgtgcattcatcttgttgctctggagtctggaatcttaatcatccagcagaactgaattgaccaatggtgaaatgtcatatttgttggtcaaaaatagctaaaactaaatctaattcactagtatcttctgcaaaagaacaccttgactttatcattgcttcataaatgacacgcggcagggcaaacccagtgccagaggctctcacctgagtgccttttggggaagggataaaccgaggcaagtcttccccgcaattgcggagaggctggttcgaacccacggcctgtgactcagtgagacagctctcactactgcaccagggctgcccttctttataaatgatacagggatatttttttgtttcatttagttggccaatgcacatttggattttgttttggttgacagg

SEQ ID NO: 1193 - DNA, 140 bp, Zea mays
  source 1..140: mol_type = genomic DNA
gtaacaccaagtcttccgacggctgttctgtatccacaatctatgtttatttgtgaaaatgcacctcacggtagggttgcggagaaaaggtttatttgtgaagctactctgacattaagtccatcttttccctgtgcaga

SEQ ID NO: 1194 - DNA, 1335 bp, Zea mays
  source 1..1335: mol_type = genomic DNA
gtaccgtcgtcatcgtcgtagatctgtcccttctgttagaaatgctggtaatttcgtcgggatttgggggttgtcagcgtgcggatctagcgcatttctatagttagaatggcatgttgccatgttgtggttcgcggctcgtagatctagccatttgttggcttgcatggaaatctatgtagatctgggcgttttcctccacattttcgtttttcgagtatgcattctatttagagtataataactggctgtgagctggctaaacatggaagagagacagacaggagacagagtagaagagggctataaggctattcgcagtctaatatatcttggcacaatatctaaacttgccatgtcatataaaattacatatgatacaactacctcaatgcatgatattgtagactgcctctttatcctctataaaattttaaatgctagtatacgtgagagtagatatcgtggaccattttgatagttaaagtttcaatgcatgtggtctcgtgttcaagtagtatctcctccaagatataactttattctctttcatcttaactattttgccacatcatcaaaaatgcttacctgacatgtattaaatatttatgatactatgaattgggaatagcctaaactaacagccagcttatacacataaattaaccaataattcttgtgagagagacaagtggactatatattaattgtgaagggctaactattatatatatcggctaaggtaggctggccaacagttggctatattattaaccttgctcttatgcggttcaaactacgcagatcaagcttgttcaattgcagcatgcatagcatttaatttggcatttctgccggcatggttagactttagtggcgtgatccttcgccacaaatttggccaggtgcctgctttggtctttggctctttcgtactactagtaactgcgaaggattcattgagacatttaacttgagaaacgagcttatataactgatgatttatgtatttaactctatagatgttaagctattttctttgctttggctgttctagagttctctgttatttgtgttttgttgtttatgaaaatcgtgcaaatggctgagcccctgtgcacgtgagataaattcatctgtcaggctagtaaagtacttagctacaactcatattggctagcggttacggtaggatatttgcttgtgattcatgttgggtgttccattttgctaggtttgtccttcttggtgtagaaaaattacttttgtctctttcatttatgcttcagcttgccaaattgcatctgaaataatctttaccttttcttctgcagg

SEQ ID NO: 1195 - DNA, 405 bp, Zea mays
  source 1..405: mol_type = genomic DNA
gtaagtttgcattgctacttttgctcagttactgcaaccacagcttcagtatcaatccataatttatttcatactgtatagtattgtggtagtcatcttcgtttgaagtgctgtgacacaaaactttctttgatgtcttgtgatgctgcattgaattacattatatggtccttgtctgtcatagatgcatatttattgcaatcatgtgctacttgattgaattaatttgtatgtcaggcacatgcatctcacaagcattttgtcaccatactatctgttctaaggtttgctttgtgctcctactgtcctgagatgaccatttcatgattccctgccttatttcttgcatttgtttctgccattaagatatgaatctgaatgttgccatttttatgctgttccagt

SEQ ID NO: 1196 - DNA, 87 bp, Zea mays
  source 1..87: mol_type = genomic DNA
gtacgcccctcccactccctagatctgcgcgcggaggcgcgacggcggtgagccacgctgctgatctgttccggctctcgcggcagg

SEQ ID NO: 1197 - DNA, 98 bp, Zea mays
  source 1..98: mol_type = genomic DNA
gtgggcgctccagctgtgtactgccgtgtccagttgctggtgtttttttttcgcgaccttacttacgattgatttgggctggagcgaactctttcagg

SEQ ID NO: 1198 - DNA, 183 bp, Zea mays
  source 1..183: mol_type = genomic DNA
gttagtcatcggagcttagccctgcacttttgcataggcatgcctgacactaaaatggatggcaattgcattcagcaggccatgtttcagtgtacttgaaaatgtttcatcactgtttctcttctttgttgagcgatcatcacactcttatatttatgagaaacttcatgctttgttttcagt

SEQ ID NO: 1199 - DNA, 5670 bp, Zea mays
  source 1..5670: mol_type = genomic DNA
gtagcttcctctgccttcttgttgactgtagaaggacactactcaacttgtctagataacggtactatctacatttaacggtaaaatatcatgtgcaatcgtgcaatcaacgaatctgaaacattaagggcctgtttggtttgatgcctaacttgccacactttgcctaacttttctgcctaaggttagttcttcaattcgaacgactaaccttaggcaaagtgtggcacatttagccacgaaccaaacaacccttaagtctgtatccaatggtaactgccgttatatttatatcctttcacctcgcacaccgttgaaatttgccaacccccccccccccccccccccctgaaatagctaccgtcagatatagattgaacatctcatattggatgattgcacagatatgagtgattgcacacgatatgtccccgagaatagaaatatgaaattgtggttcatctggagaagcagctatcttaatggtatatttgttgtataataaataataatatatcaaacaataagtttcacttgaacattcattcaagaaaaagctccacctgaacatgttaatgatagccgcatcatgcaataaaaccgcagctgctctctctctctctctaaatgcataggtttgttggatttgtagaaaggaagaatggactgaatcaccacacacccattgagggtggggagcctgtcatatatagccaataggcatgcatggaaagtacatgtatggaaggctattccctgtacaaggaaacagacctaggctatagatagaaagtaatcctaggctatacaaggcagctagccaatctaggggattacaatcaatcgcaatcaggctctgattgatcctgatatatacatatcctaatacccgcccgcagtctgagcgggagaatcacggacgcaaagactggtccgaaaatcggtgaagagctgtacgggcagacccttggtcatgatgtcggcaaactggtgcgtagacggaacatgaagaactcggaactgccccagagctaccttctcacggacgaagtggatgtcgatctcgatgtgcttcgtgcggcggtgatggactgggttggctgccatgtacacagcgctcacattgtcacagtagaccacggtcgcgtgcgggatggagatgtgcagctcatgtagtagctgacgcagccagcagcactcggcaacagcatgggccacagcacggtactctgcttcggcgctggagcgagaaacagtcgtctgacgcttggacgaccatgacaccagattgtcgccgaggtagacgcagaagccggaggtggagcgacgcgtgtcggggcagccggcccagtcggcatcggagtaggctgtgagctgatcaacggcgccgggtcccaagtgcagacctgccgacagggagcccttgacatagcgcaggatgcgcttgattagcgcaaggtgtggctcgcgagggtcgtgcatgaagaggcagacttgctggacagcataggccaggtccggccttgtcagggtgaggtactggagagcaccagcgaggctccgatactccgaggggttggcgactggagcgccctcggaggcagacagcttggtccgggcatccactggagtagctgtcgggtggcattcagacatgccagcgcgctggaggagatcaacggcgtactgccgctgagagaggaacagtccactgctgtctcgtgtcaccgagatgccgaggaaatggtggagatccccgaggtccgtcatggcaaactccgacgataggcgggaggtgacgtgctggagaagagctggtgatgatgcggtgatgatgatgtcgtcgacgtagaggaggagataggccatggcgtctcccgtcttgtagatgaacagggaggcatccgttttggaggtggtgaagccaatgcttcggatgaagctggagaagcgctgattccaggctcgcggtgcctgcttaagcccatacaaggacttctgcaacaggcagacagagttaggtgcagcggggtcgacgaatcctttcggctgctcgcagtaaacagtctcctcgaggttgccgtggaggaaggcattcttcacgtcgagctgccggatgggccagtctcgggacgcagcaatgctgaggacggtgcggatcgtggccggcttgacgactgggctgaatgtttcgtcgtagtcgacgccttcctcctgggaaaagccacgaacgacccagcgtgccttgtgccgggcgagggagccgtcggagtggagcttgtgtttgaacagccactttccagtgacaatgttcgcaccaggcggccgaggtacaaggcgccaagtgccgttgtcgatcaacgccttgtactcgtccgccatcgcagcacgccaatttggatcggccagggcactgcgatagttcgccggaattggcgaggcgacggaggcggagaagccgaagcgctggacagtgcggagggagccagtctgtgagcgtgtcacaggccggtttgctgcagtagataggagccgagccgctggagccgctgggggcgaagctggtgcagccgctgttggcgctggaggtgcagcaggcacaggagccacctcctcggtgaccggtgctgctgggggctgggcgcggcgagtgtaggtgctgccgaagcgttggccaccaggcggaggagccgccgactgccccacttggggccctcgagcgcccagctgtggcccgcccgcaggatgaacccgggggccgagctgaaggatggccgggtctaggagcacctggagatcatcctcgctgctggcagcgagcgatggaggagtgcttgctggtgccggcaaggaggtgaggtcctgcatcagaaaatcaagtgacgacggcatggagcccgccgatggtgcagccgagaatgggaacacagactcatcaaaaatgacatggcgcgaggtaatgatgcggcgagtggacatgtcaagacagcgatagcccttgtgggaagatgggtatccgaggaagacacaaggagtggatcgaggggcgagtttgtggggggaggtggcagtaaggttcggatagcagagacatccgaagatgcgaagggaggcgtaatctgggagtgtgccgtgaagtatgtggtgaggtatttggttttgtatggaggaggaggggcgcctattgaggaggtaagttgctgttgcgagggcctcagcccagtatggaggtggcatgaacgcatggagcagcatggtgcggatggtgttgttggtagtgcggagcatgcgttcggccttgccgttttgtggtgaggtataggggcaggaaaggcggagagtaatgccatgactagtgaggaaggaggtggtggcgtggttgacaaactcggtcccattatcagcttggaaggatttaggtgtggtaccaaactgggtttgagcgtatgcaatgaagtcaatcatgtggcggtgcacctcagatttgtgacgaagtgggaaggaccagctgtaatgggaataatcatcgagtataataaggtaatatttgaacccagaattgcttagtacgggagatgtccagacgtcgcagtgaagtaaatcaaacggagcatgagttacagatgttgaatgactaaatgggaggcgcacatgcttgcctagttgacaggcatggcagaggcatggcgagtttttattgtaggaaatgaccgacatgctgcgaagtttggcgaggctggaaggaccggggtggccgaggcgatgatgccacaatgacgacgtggtggcgaggctgcaggagggagctgtggtggaggggtaggtgtagaggtcgccaccactattgcagcgaagagtcacgcgccccgtccggttgtccttgacagaaaaaccggaagcgtcaaattcaattgaacaagagttgtcacgggtgaattgacgaacagaaaggagattgcgcacaagtgcaggtgcaaccagaacattgttaagacggtaggtagaggtgggggaggagagtgtggatgtgccacggcaggtgataggtatggtggtgccatttccaactgtgatgccgaatgggggaggggggagacgggacaggagtataccagccgaagacgacatgtgagttgtggcgccggtgtcaaggacccaaggagaggacccttggagggacatctggttcagtgtggctatgaggccagcctgatcccagccgccctgctctgccattggtggagcagggttgtcggagtactggacaggggccagcgcagtgtgcgcctgggcctgagtgaaggggccgaggatgccaggactgcgccaggctggggtcggcaccggcgggcgccagggctgctgatgcaccccggcggtccagggggggtagcagtaccagggggtggcaggaaacctgggaccgccgccggagtgggatccgcccttgcctttcttcttccagcgaccgccgccaccacctgggttgccgccgctgttggagcgactgccgtgaccgcccggtctgctggctgtggaaccgccgccgttggtggtgggggcggtgcggcagccggtgccgcatgatgcgtggaacgccgtctggtccgcaaccgtgccttcgttggcgaggcggagttcctttagcacgagcttctcgcgagtggtggcgaagtccggcagcgggtgtgagtcggcgatgttgtcggcggtgctggcgaagcgtgggttgaggccacggaggaggttgaggacgagctccgcgtcagtgatggtgcggccgacatcgcggagcgcgtcggcggtggccttcatgcgctgagcgtagtcgttgatggaggagtcgccctgagtcatcgagtgaaactcgtggctcagaaaaatggcgcgtggagccttgttggcctcgaagaggcgctttatggcgacccagagttcgcgcgcggtctggtttggagccgcggcgaggccgatgacgtcgggaccagccgagccgagaagccagctgcgaacgcaggcatcggcgatgccccaagaaggatctgtgggacgggcttcctgcagtccgtcaatatgcgagaggagagcgaatttgccacagagagaggtgaagaatggtgcccactggttgaagttgggttttgccagctcaagagtcactgggatatgattcttgacattgatcgtcgcatagggggcgacaaacacagcgggggcaggattggtggctgcgtcggtcatggcgacctaggagggagaagaggcggcgcagcagggaggtggtggcgctgcggcacagcagggtggggatggtgcggcagcagggagggaagcgcaggatctagagaacaggattatcagtttaactcggaacttggcccaagatgtgaatatattctaaattatttacacataactgttgttctcttataaagattgtagctatgcctttctggataaattggacaactatgatattgatatgatcaaaactatttccattgcatgtaacttgtttggtgaattgatttacagtttcactttgacatagatacaaaggacacctatttcttagatagtttgatataatcttctttcataaaatgacactaaacaattgtattatatttatatgcatgagtcactgggtcccctctttttgcatgcagg

SEQ ID NO: 1200 - DNA, 666 bp, Zea mays
  source 1..666: mol_type = genomic DNA
gtatttaaatgtcttgttatgttcgctggtggacatatgtattttgctttagaagaacattttttaagaaattcagaagaatgtgggtggaattggttctcttttgcacttcatggcaatgcattttgtttaaagtattgtatatcagccacctagttgatccattgaaaaatttacacctaatactatattgattgagatttgattatttaaaacattgtttgtgaaagaaaacctgctttttccaaataatgccatctattttttgtttcatattttttccactggtgaatgtttttctttaagggctactttaaatcccctctgggattcccgaggattgaggaaaaaattaagctaatttccccctcaattcctggaaatcccggaaagggtttaagtttccaaactagccctaagtattccgttccactccttcgagtttctagccatggagtttttttatagaagaaatggtccttccaaaaggacatttagtcataatccaccttagggcttttcgttttgctctcaatctatggattggggtggattgagtgggtttaaattctaaataagtcgaaatctttcataatttttttcaatctcattcaatccacatgggataagaataaccgaacatggccttactgttgctttttcagg

SEQ ID NO: 1201 - DNA, 343 bp, Zea mays
  source 1..343: mol_type = genomic DNA
gtatttggttttactaaacagagcatacagatatgtagtaacttctatttcaccattcgtgtcagacttgcagtaattggttgtagcttgtaggtagacaatgacatgcagaactactcccttttgttaatctgagttcactttacttcacttgtacctgagttaagtacttaagttggcttcgtagaatacctagtttgacacttttgagttcaaacctttatgattatgatgaatgtgactgcaatgctaacttttcttcaagtacatttttgctatacatgttaattttagcattatattttaattcaaccttcttatattagtgtcaaatctgcgcaga

SEQ ID NO: 1202 - DNA, 73 bp, Zea mays
  source 1..73: mol_type = genomic DNA
gttcttatgatccgagtatcattatttattctaaggcattacatcgagtctgaaggatttccaatggcacaga

SEQ ID NO: 1203 - DNA, 121 bp, Zea mays
  source 1..121: mol_type = genomic DNA
gtacggacttcctgatttgctctccatgtcttcctgacagcaaaagaaaagggacaaccggctggaatcgttgcggctttgccagttttttagtcacacctaaatcatattggttttcagg

SEQ ID NO: 1204 - DNA, 179 bp, Zea mays
  source 1..179: mol_type = genomic DNA
gtataccagctctcagtttatttgtgtacatacatatatagcattacaaaatttcttggaaagaaccagaacacctgaaatttctgaatgtgaacttgtctgcttggacaagttattacactaccttggtgaagtatgtgtgttgcaacttattatgggagttctttcctgtgcctagg

SEQ ID NO: 1205 - DNA, 281 bp, Zea mays
  source 1..281: mol_type = genomic DNA
ggtattgccaccccttctttcccctcccttcctttcatgctgtgcgaagctgagcatcggaaccctgacctaaagctatttagcggcgtcgctcctctgcggggcgacacgtgcggaaccagcgccgccgccgcaagagttggcccgcctcgttctttacaatatcgccttcgcctgagcacgcggccggaggcccgcgtcggtgcgaggatggcggcggcgaggtctctcagcttttctcgcccgttctcttaagcgtacttgcctcgtgcctgcgccag

SEQ ID NO: 1206 - DNA, 359 bp, Zea mays
  source 1..359: mol_type = genomic DNA
ggtgcgctatggccggatccgtggtgtgttgtggtgtgggtggagattcatttgtgggggcacggatccgccgcgctccatgagtccggatctgcactccttcgagagttttttgcagaaaaatattgggtgtacatccatgtcccttttactggatccgaaccctgagtgtgatgtcagaaactgttgtctttgtgttgtctttgtgtgaacttctctgtataaattgaatttactgctttcagttagcatgtgtattcaaatccagtcttccttttcattcacatgttgaactaaaacactttcatcactggttggtatttgattctatccatatgccacattgccgcttgctgcag

SEQ ID NO: 1207 - DNA, 93 bp, Zea mays
  source 1..93: mol_type = genomic DNA
ggtcagccccccctcccccctgacccccaacttgatttgtacaaccttatttccaagtatgccactaattatgtgtaccttctactcttctag

SEQ ID NO: 1208 - DNA, 344 bp, Zea mays
  source 1..344: mol_type = genomic DNA
ggtatgacctgcttcttcctttactttggtgttgattcagtatttcagttctctgaccagtcctagtaatatctctatggtctcaatatgctgttattaagtgtttatctgaggttattgttaaggtcatatcaagccaccaagtatctttatcttctattcttgctcatgagattgcataactcagatacactgcatatgtggttaccacctcagtctgtgctgagattgcatagttcagtcaaaaataagcataatacatcaataataaacaatggaagttaaacataattgtttacatggtgtggctgatgtttccgcttttttattttctcaatctacag

SEQ ID NO: 1209 - DNA, 115 bp, Zea mays
  source 1..115: mol_type = genomic DNA
ggtatgggttgtttatattgctttcagctgctgcacttgatttctttttaactcccaatatggctgaaacaaagtcacgtctgaattctgttatgcgatgccattgatttaccag

SEQ ID NO: 1210 - DNA, 1105 bp, Zea mays
  source 1..1105: mol_type = genomic DNA
ggtctgccacccctcccctcccccttgttcacctctacgactcccgattcgtagccgaattgtgtccttcgtgatcggtgataacatcggagtagtcgtgttgattgcttcatcgatttggtagttcctttagtgcggttcttaccctttgcggggaaatagatcttgggatagtgtctattggctgaagtatgaagattctcctcataactggcgcttatggtaattttttgctggttggtatcgtgccgtgtactgtcgacacttaagccttattcgttgtgatgaacaaacaaatttaggaaatttagtacctataaactgttatgtggttatggaagatgtaatatttccacaagcacctagcatagaattcttttcataataagaatgtaaagagttgaccccatactaatactgagtatcactatttatggcttttactccctcattgccaaattgtaagtcgttttgagtagcacaaactatgcacctagatcctagaaaaaccaaaacaaattacaatttggaatggaggcctccatattgcatcatggttgctacttaattaaaggccaagccatctttttttgtaatacttcgttttgtatactatgtgacttagtttaggaaaaccatgactttgatcttacttgtaacccggtcccattgcggaataacatgtttcttatcctctgttaggatttgcaaagtagcgagatattccttattttcgcttatgtttttggagtgcaactgctgcttagattctcaaacacattttaggaaataaaagccgactttgagtcatttctggtgaacaaaaaattgcctagtcaaaaacctcaatcggagctagctttggataacattgtccatgctcaagtaaattttatttgctaacacttgtccatgttcaatatttgtatcccacacctttgtccatgtgtgatcatttttcatgtatcatttgttttgccaagtgcatttaaatgtgaatcaaattccaaaacttgtgataatcaattttaagtaacactgattcagagacaggtgaaagaatgccattctaactcggcagggtatctgactttgtatttttcag

SEQ ID NO: 1211 - DNA, 113 bp, Zea mays
  source 1..113: mol_type = genomic DNA
ggtactctacttgcccccaaaatctaaatgaatgtgaaacctttttctaagctccaaattcttgtaatcttttttagcattgtgtggtcctaataaaaatgttccatgcatag

SEQ ID NO: 1212 - DNA, 630 bp, Zea mays
  source 1..630: mol_type = genomic DNA
gtacgtccgcgcccccattccctctctccccggtcctcgtctaagtgagcatgacctgttcgagagctcctcccctcacgcgctggccgcggtgaatcgattgatggcggtttccgggttgctcgaggtcagcaccgcttgtgctctgatctgtgctgtttgtggatatgtcggcgaggtcaagtggcttgtcttcggacctctgctgcaggtttcctacaagtagaattcgcacaagccatgcttaggtccccgtgagaattttggagatttcatttggcattggtggatgggcactgaattttgtttttcctcaagtgtaaacacgtttttcccagtcaacagggattagtgtttaaatgttattggcctatagcattgtatttagctggaattaacgatatacaagaaattgaaggaactgtttgatacttacaacacccatgtatcatgttcctcattatgctggaaattgtttatgcgaactaactgtgcagcccttaaaaacatccactgtaacacttatgccgcgtctgtagtggatgaatgcagtatttgccatttctgtttatctggggtatattggtggctaaattaaacaagagccagctctaattagttacctgcagg

SEQ ID NO: 1213 - DNA, 157 bp, Zea mays
  source 1..157: mol_type = genomic DNA
gtagagtttctctgtatatctctgcttggacctaatgtttccactggatcaaccaatcttgcaggctttgtagactttcttcttttgtcacttggcgaaatgcttattttcttgttttaggaatacatgttcaaattccttttcatattctcatagg

SEQ ID NO: 1214 - DNA, 139 bp, Zea mays
  source 1..139: mol_type = genomic DNA
gttggctatctggctttaatttcgtggtgactaccatctgattcactgtacattggatattgctttgttattataaaacactaaaacagattttctcctaccatttgtctaattgtcgtgtttcccatgttcattcagg

SEQ ID NO: 1215 - DNA, 215 bp, Zea mays
  source 1..215: mol_type = genomic DNA
gtgacttaatgttctctttcccagttgttacattggttcatgtagcattttttatatcgttgtattctttgtggaatctttagttacttgtgcttgttcattgactgcaatttgggacacttcgacagaagaattagtgaaagtagttaaattgttgtttgttttgggcgctgaactgttcagttcataatatattggatctgctatgtggcagg

SEQ ID NO: 1216 - DNA, 81 bp, Zea mays
  source 1..81: mol_type = genomic DNA
gtattacctgtctctataggaagggtggttaactcttaagtcttcatgaagtttgaatcctttattatgaaatattgcaga

SEQ ID NO: 1217 - DNA, 478 bp, Zea mays
  source 1..478: mol_type = genomic DNA
gtacagttttgtcagatgacccccccccccccccccccccagtgtggatatatattggtcaaatcaaatgatggcaccatggaataagctttgccaaatgctgaagtgtaatgacttaggagttacatacatggaatggtcatctgaaataagaatccacgataaaacatagtagtgtacaggaagttactggagatatgaaagtttaacctgtgttgtttccttgatacatcaaacaaagcacatttgtatccacctttctccttatacactcctatatggcctgataggctgaaacaacatgaacttttactacaaatctgtaaatggatttttgtaaatactagcatggtggcatgttatttgttagtcaataacttttagttggagtaaaatactgtttaatatttttccttttttgtaccatgaaattatttgtttgttgtcttattttatttggtcttgccatgtatttagg

SEQ ID NO: 1218 - DNA, 82 bp, Zea mays
  source 1..82: mol_type = genomic DNA
gttatcctttctttttgtaaccattcaggtctttgttcgattgtctggcattaaaatttgtaagcatttcaactgcaacagg

SEQ ID NO: 1219 - DNA, 108 bp, Zea mays
  source 1..108: mol_type = genomic DNA
gtaaaatgatctcttcctcctaccttccctccatctttggtgggatttcagtcttttatttatttgaaaaaatggataatgctgtatcaagtgatgctgtgctacagg

SEQ ID NO: 1220 - DNA, 448 bp, Zea mays
  source 1..448: mol_type = genomic DNA
gtaagaacatttttcagcaagttttaaattttctagttcatttatttgaatagtttagtgtacatgcatattttgctgtttacatagttggctgtttggtcatgtattctatacgctgtttagttggtgtggtcaagttcaggaacctttctgatgccaatcaactaaaactctaatcttgcagctgcaaagaaatttagataccgtgtcattgttacttaggctgattgctcacatgtttctttagataaaatgacatgcatatgcaattattttttcttgagaacaaacaccaacagtgtttttaaagcgtaaggtgaggcaagccgttggaccaccgcctggacgccttaaaaacactgaacaacagtactgtcaactatgtacaaccttgtggacggcttcattcttttgtgagacatactgatctctgacctcttcgtgcagg

SEQ ID NO: 1221 - DNA, 71 bp, Zea mays
  source 1..71: mol_type = genomic DNA
gtaagtttaatgaagtttaaatgttgttctttgcgctatataaaatgctgagcaatctgttccaaagcagg

SEQ ID NO: 1222 - DNA, 8614 bp, Zea mays
  source 1..8614: mol_type = genomic DNA
gtaccatttcatgaatcatgatcaggcactttatatgcggaaacaatttgatgtcctatcatattgattattgattgaattgacaatccacttgaacaccactctttcttttgatagccatgtggactacatcaattattataaatgatccacaatctctgctacatgttgaaaatgattgctaaatccctgggcatatcttttgttagagtacctgtctagggttttggggttagccccttgtaattattgtcacacccttgtgtaatgagccaggcccaacatctattgatatatataccagcaccaaccctagttaggattagggtttcccattccaatttggtatctgaaccgattcctctcttctcccttccatctccctccccatagccaccggcgtcgttggctcttggcttgtcgctggccgttcctctcctccctcatcggctcccacgagctcctgcgcctcagccccgtcggatccgcgtccgtggtgcgcgagcgccgccgaccggtgccgtcagaccaagctttccgcacgctccctccacgctggtcgccgccatctccggtcgacctcccttgcgtggcccgccgccggctgcctccatttgccctcccctgtgcggctcgcccctatccgtccgtctctccggcgggtccttcatgcgcgcctaagacagccgcgggggggggggggggggtgcgtcctcctccttgcgtggccggtcggcctccatctgccctcggtcgccctcctctctggcaggtccttcctactcgcctaggacgcgccccccacctaggacgcatcgaccggggggttgcgtcctcccagcgccctgcacgggctctccttcgacgcgccgccgtccctcctgccatgggctcggtcacgttgttggaccaccatctccatcctactattgaccccctcaccagcatcctcgtgtctccctctccacctcttggcccctcggtccagcatcctctccccgtgctacccttcaacagcagcgcgacctctacctgtcgcggtggcgtgaccccctttccctctacccttctaccgtacgtcgtggctcccggcacctcctacgatatcccaccacccttggtgcctccagcttcgcccagtttcgccgtagtcgctgcgtgtcctccttcacgatggccaccttgtccaagtatttttgtgtccttcgatcaggccatgaaccgtgttcttcgtgaccgcgtcgagctccacccccaggccgaccgtcatgtacccgaacccattgtcttcctccatgctgcaatcgcctccctggcaattgagcctccgttgtccccctgctctcctagtggccctgtcggagcacctgccctggccctttccgcgcgcctcgtggcctcaccaccctctccctctctcaccgactgggtggtcgactccggatcctccttctacaccactcccacagctagctcgttattccaccatcatccaccacacccctcacatcctccatcgttgtgggcaacagttccaccctcccggtcacctcaatacgtgcatcggttctttcgggaccattctatcttaatgacgtccttgttgctcctggtttgactcatctccttctctcggttcgtcatttcactagtgtcaaccattgttctatggagttcgatccctggggctcaccatacgccttcccacgcgtgctgtgctcgctcactgtgatagctccgaccccctctactctcttcacttgccctccacttcccccaccagcgtagcctcatcacgtactcctgctactaccaccacatcacatgctcttgctactaccaccacctccgtcgtttggtatagtcgcctcgggcaccctggacctaacgtgatgtcctggctttccagccgcttagacatctcctatacccgaggctcctctgagcgcctctgtcatgcttgtcagctcggccagcaccctcgtcttcctttttccacttccacgtccagggctgtttaggcctttgatcttgtccactgtgatctctggacttctcctgtcctcagcctctctggtcacaaatactatctagtcattctggacgactactcccattttctttggactttcactcttcggctgaagtctgacacgttcaccgccctcacccaattctttgcctgggtctccacctagttccattgtccggtccatgccctccagtgtgataatggccatgagttcgacaacaacgcctctcgatccttcttcgtcacccatggcgtccagttgtgtctctcgtgcccctacacctctctccagaacggccgaaccgaacgcatcattcgcaccaccaacatgatccgctgccttctcttccaggcgtctctccctgccagccactgggcagaggccatgcacaccgctacacatctcctcaaccgtctcccctcggaagtggtgagccaccccactccccactttgccatgtatggcacaacccccctcctatgaccaccttcgtgtgttcggttgtgcctgctatcccaacacttccaccatcgctccccataagctatctcctcacttcagtcgcttcctcttcctcggttactcccctgaccacaaggggtatcgctgtcttgacctcggcacccatcacatactcatgtgttccgccttgttggctcctccccacccaccgatctcgactctttttgagtcggatccggttccacctccaccccaggcacatcgccttgcgtcattccccgcgccaagcgcaacgtcgacgcctttgctcgtgcctctatccatgccacgtgcggtctcgacgcctccgcccgcgcctcttcctgcaccacgcgcgtccccgtcgatcccgcatgcgccacacgcggccctgtcaacccctcccacgccatgcacggttcgcttcgccgacccgcccttgtctaccaatgccgcgggcgggccactccctcggctcctgctgacccggccccgtcgacgagcgcagcttgcttcgccgaccccgcgcttgtctaccaccatcgcgagcgggccactccctcggctcttgatgccccgctggctcgaattgagcctcccgtgtaccacctggtcgccatccaccgcgactctgagcatgtccacccgatggtgattcgttgcacagccggcgttctctggcccgtcgactcgctgatcctagcggctgccacgaatgccattccatcggacgcctccccggtccctccgttcgcgccgccctcgtcgacccccactggcgtcacgctatggaggagtacgcggccctgctggccaaccacacctgggacctgatgccatgtccaccaggcactaacgtggtcaccgacaagtggctctttcgccacaagctgacctcggatagctccctcgatcgctacaaggctcgttgggttcttcgggccttcacctagcaccccgaagtggaatatatgacgagaccttcaatgacgtcattaagtttgccaccgttcgagccatccgctccctcgccatctcccgcgactaggcgatccatcagctcaacgtctagaatgccttcctccacgacactccgataaagactatctactacagccagcccaccggctttgtcgatgtcgctcgtccggatctggtttaccggctgaaccgctccctgtacagcccaaggtttacaaaaccgtttcagatgtaaaaaccgccccccaccggtaacggtttaccatcggtaaaccggtgaaaaccggtaaaaaccgaccggtttggccaaaccaaatcattttgaattcaaactggtttaccagcgaaaaaccggtgaaaaaccggcgaaaaaccggtagaaaccgccggttaaccacgaaacaaactggtttttattatttttttgcagaaaaattgaaaattttgttagaatttatttgtagtttgctcaattcacattgtacagtaaatattaattgatctacacaacatgcattcaccaaaaaaacatataatatatatatatgcaaccacaaactccagttctcatgtaataaacaaccagcgaacttcgcatactcaaatacaagttcttttacacctctccaacgaggcaacgacacataggtcgacttatttcacaatactcacatgttcacctcgagtcatagtgatagtacttaagcatgttggaagggtcgtgatattgtttcaatccatcatagtgatagtgataggtctatacaaaagatacgagatacattagcgagaaaataagaacgacaaataaatacttatccataaagcaaaacaacataccggtatgtatgtttggtgtttgtgtattgcacgtgcacctcaccaagtgttgaacttttctcctgatcagcaaatcttaggaacacatacagaagaactggagctaagagttctagctagattgagtattgtctagacggatacttattagaagaactgaagctacttgatccacagattccatcttggacaggaaatgtaaccgaaattgaccactaaatgtctaaacttgacttgagctaccggtttcatcttcaagcaaatcttaggaacacatacagaagaattggagctaagagttctagctagattgagtattgtccagacggatacttattagaagaactgaagctacttgatccacggattcaatcttggacaggaaatgtaaccgaaattgaccactaaatgtctaaacttgacttgagctactggtttcatcttcaagcaaatcttaggaacacatacagaagaattggagctaagagttctagctagattgagtattgtccagacggatacttattagaagaactgaagctacttgatccacggatttcatcttggacaggaaatgtaaccgaaattgaccactaaatttctaaacttgacttgagctacgggtttcatcttcaagcaaatcttaggaacacatacagaagaactggagctaagagttctagctagattgagtattgtccagacggatacttattagaagaactgaagctacttgatccacggattccatcttggacaggaaatgtaaccgaaattgaccactaaatgtctaaacttgacttgagctacgagtttcatcttcacatatagcatataacatctccacatataacatataacattaaacaagactagtatacctaaattgaccactaaatactcaatcgtggcattaaattcgggtttccggcaaaaattggcggtttaccgatctaaaataacggtttaccggtcccaaaaaacggtttaccgacggtttccggtttttatgaattttttcaaatttttcaaatttggaacgaattttgaaaaaaaaccggtggttaaccgaaaccgcaccccagcggtttcggtaaaccgaccggtttaccgccggtttttaccggttttgtaaaccgtggtacagcctcaaataggcgtcacatgtgtggtacagtcgcttcgcctcctacttggcctccatcaacttcgtcgaggccaagtcagacatgtctgtgttcatctaccgacgcgacgacgacaccgtctacctcctgctctacgtcgacgacattgtgctcacgacatccacccctgaccttcaacagcgcacgatcgtcgcccttcagcgggagttcatgatggacctgtagccccttcaccacttcctcggcatcaccgccgagcgccggcctcaaggtctcttcctccaccagcgcaagtacacaatcgacatcctggagcgggctcgcatgtgcgactgcaacacgcctgtcgacactcaggcgaagctctctgaggacggcgggccctcggtcgccgacacgacgtactaccggagcctggccggcgcgctccggtacttgtccttctccaggtccgtcattgcctacgccgtctagcaggtgtgcttgcacatgcacacctcgcgggagccccatctcatctctctcaagcggaccttgcgctatctccgtggctccctcgactacgaccttctactccgatcctccccgacgtcggagctcgtagtctacacctttgctgattgtgctagctatcctgacacgcgccggtccacccgatttttttttgcattttagtcctttctcgggaaaaaatcacgtttagaccctagaaaattttaatgtcatttttggaccctttgctcgccgccgtagcctatggcgccgaggtaacacagcttggcgccataggctatggcgccgaggtacgtgctgcgctggcacaaacggacgtcgtggcgccgacatggcaccgagctcggcgccatagatcttggcgccgagctcagttgtgtacacaaaacctgtttagctcagtcggtaaagcacaaggctcttaaccttgtggttgtgggttcgagccacacggtggttgtatttttttaatactttttgtctttgtcactggtttgttttttttgttgtccagatttttcgtttatgtcgctgattttccgtccagatttatttctcatccgaataaaaagaatctggacgaatacaaatcagtcacaaaaacaaaaaaatctggttgagaaataaatctggacggacaaatcagcgacataaacgaaaaatctggacaacaaaaaaataaataaataagtgacaaagacaaaaagtattaaaaacgcccaccgtggggctcgaacccacgaccacaaggttaagagccttgtattttactgactgagctcggcgccatagatcttggcgccgagctcggtgccacgtcggcgccacgacgtctgtttgtgccagcgcagcatgtacctcggcgccatagcctatggcgccgagctgtgttacctcggcgccataggctacgacgccgagcaaagggtccaaaaatgacagtaaaattttctagggtccaaacttgatttttttacgagaaagggccaaaatgcaaaaaattcggccggtccacttccggttatgccgtgttcctggccgccaagcggcagcctgtcgtatctcgctccagcgcagaggccgagtaccacgctgtggccaacagcgtggcagagacctcctggttgcgccagcttctccaggagcaacatagcctcttcagcgcgccaccctcgtctattgcgacaacgtcagtgcggttcacctctctactaatctcgtgcagcatcagcgcacgaagcacgtggagattgacctgcactttgttcgcgagcgtgtcgcttccggtggcgtttgggtcctcagcgtccccaccatgctacagttcatcgatatcttcaccaaagggttaccgtcgggtgtattcaccgatttttaatctaatctcaatatctgtacatgatagagttgcgactaggggggagtgttagaatacccatctagggttttgggattaaccccttgtaattactgtcacacccttgtgtaatgggtcaggctcaacatctattgatatatatatagcagtcccaactctaattagacttaaggtttcccattccaactttctatatattgctggcaaataacggctagacaaggctttacttttcttttgaaggaactgtaatgttctctcagtactgagaaattcttagacaatgctcctttagaagcagacagtggcggagctccttaaaaataacgccccgggccactttacaaatataacgatgtactactcgtcttttagtttttcgcactttaggggtagtaacatttaaaacaatccaatggaacttttaatttttcgcactttaggggtagtaacatttaaaacaatcaatggaactgtggcagatagagaaaaagaatcaaacgttcgacaacaattactcacaatagaggagaaacactcagcacacatcgcttgccgctcaggtggtcgctgccaattggccagggaggcgctccgccctcgcctatgaataagaaaagaaaaggaatcaggttgaggaagttgtatagtttgggagaaggtgtaatggcaggggtagatttgggcggtggcgcggcgccagtgcaggccgcgtgcgtcattgctacagggacgctagaggcgaattggtggaggtggaggccggactggcggtggcggatgcctgagttagagctcacccggccgcctcggaggttgttgccttgtgcccttgcagaattcgtagagccttaaggcgtggagagcgatagagggctgaatggaggcggtcgcgccactagcaacataggaaacgcagccgcacaggtttgcgaaataattgaaagagtctatgttctcgtgacttgagcgacttagggagaccgccagcgccaggctcaatcagtgcaagcaggaggtcttttgggccacatttttagactaaaatgtattttggtctagattttttggttgaaaaaagacatatatatataagaggattttgggctgcgccccgggccacggcccaggtggcccggggcccatatccgcccctggaagcagataattatggtgccctaattctcgtatactgactatgtttatgaattcgataattttggaatctgcactattccagc

SEQ ID NO: 1223 - DNA, 819 bp, Zea mays
  source 1..819: mol_type = genomic DNA
ggtaagccctcccctccctgatccacaccatctccgcttccttcctagactagatccgccgcccgttcttactctgggtcacgcccgagtttctcgcgtaccaccccgacgcaatccgctgctgcttcggccaccgactcggaggagccggttcgtgagtggaccgccggtggatggattcggctggacggtggctgggagccatggatgactcgaagcgagacacggttgtttgctggggcatcggtcgccgcagtttggtagttcaggggcattggattagcttgaaaccacatttgctgacgcagtcgggaattgttattcacaaacaatggcgtggggtgctcgaaaagttggaaaaaattgctattttagcccttctaacgtgggctctctgtatattcaaaatttgctggtcaaaaatgtctaggtcttgtgttgacagcgtatttgggttaagttccatccccccccccccccccccccccccaattttttgttcagttgaaaaccataaattatttcatgaatgtcagacatatagtctgtagaacaatgcagttactagatagatatattgatgcacagaagaaatgtcgattcagcctgaggcttttagtacaagctaaattttctgtgtacatgtgatatcctgctgaaaatttggtgaccttaatctgctctcagctttcgccagtattataatacattatacggacagatgcgaggcttgttgagtctccggtatgagtaaacgacaatgagccagattacaaaagtggatgattcattctctaattccacaccttctggtcgcag

SEQ ID NO: 1224 - DNA, 88 bp, Zea mays
  source 1..88: mol_type = genomic DNA
ggtctgaaactatttttgttaccatctttctggaacttacttcatgttcatgggtacatcttataataggtgcttatgttcgttgcag

SEQ ID NO: 1225 - DNA, 140 bp, Zea mays
  source 1..140: mol_type = genomic DNA
ggtatatctatattgctggtatgctttgcccttacttgttatgccataccctttctccaaaaagttgatatccttaattatatatcctaagtctcccagctcttggtaaactgagacctttcttttttttcttcatttag

SEQ ID NO: 1226 - DNA, 90 bp, Zea mays
  source 1..90: mol_type = genomic DNA
ggtatgccatttccttttatcaatttgtcacatactgccacatctgtagtttctaacatcaatgcgtaaaaaattgaatcccatgaacag

SEQ ID NO: 1227 - DNA, 113 bp, Zea mays
  source 1..113: mol_type = genomic DNA
ggtcatctctccctcctgaccatgtgctcctgtctggggctttgtgcatccacacaagcacatacaagatcacattaacactccactctacatgtatttattatatgtttcag

SEQ ID NO: 1228 - DNA, 590 bp, Zea mays
  source 1..590: mol_type = genomic DNA
ggtatgtcaataccgttcttccctatatttgactaagtattatggtttgagagggggggggggggggtaatttctaatcatcttcgtgtaaccagctcaaatatcatggtagcatcatattaacccagaacactgtaggatggaattttaaatagtgcgccagtcaatgattcagtacgctgtatgaaagcctttaagaatttgggatctttacatttataaattagagatcaatcacatatgaataatagcaaaaagatataacactatctaattgaccattgtatattatctggtttttaaactatgtttgaatcctctgcatctcatgctcttttttgttttcagcgtgtccttttgatgtttttacatcattttcttttaaaaaaactacaaccatgcaattttgctcatgttgcaaaacctatttccatttgggatattaagtttggaccagagatcaaccttctttatccctgtgcgacaagtgtctactttaacaaatactttgatatgaagcttttaattttaactaatttattccacttccaatcttaaatttgtacctaccatctttttcatgcattcag

SEQ ID NO: 1229 - DNA, 86 bp, Zea mays
  source 1..86: mol_type = genomic DNA
ggtaatacctatctttctctgaagatttcttctgcagttgctgctacattatttttataattcaattaattctcccactttaaaag

SEQ ID NO: 1230 - DNA, 76 bp, Zea mays
  source 1..76: mol_type = genomic DNA
ggtaagttgttttattttcttaattattgtttctgtcttgctggatatctagtcatgacagttaaattatgtacag

SEQ ID NO: 1231 - DNA, 72 bp, Zea mays
  source 1..72: mol_type = genomic DNA
tgtaagtatgttgtcctgcttccatttcttccctgtaccttttcttactgtaagcttagtttttgtgatcag

SEQ ID NO: 1232 - DNA, 106 bp, Zea mays
  source 1..106: mol_type = genomic DNA
tgtaagacttccatttctgtttctgcataatgttattgatcacagtatgcaattgtgtcagcaaagtcagcaataagttattattcaccaaatatttgtttaacag

SEQ ID NO: 1233 - DNA, 449 bp, Zea mays
  source 1..449: mol_type = genomic DNA
ggtatacatgtcttaccagttcaatcgttcaatagttcaaatgaaacatgagctaggacactagtgaattcaaacttcctcaatgatttctgcctgatcgtggttgtatatagtcatatatactttggtgtaatatttttttatttaatatatttgtatagaggctgtaatactgcattcttgaatatagcaatttgacagaatactactattagacttgtggatacttgtctcattgtcttctttgcacgaaacacaacttaaatgacataaattgaacagtatagtgcttaagggtatttagagtgttgaatttatttaaatttatgtgacatttatattctggactaatgtcaaattcaacaaaggggctgaaaccatattaaaaaatagtttgatcaggttgcacatctttttcccttattagaatatcttatcatgtttcacag

SEQ ID NO: 1234 - DNA, 3353 bp, Zea mays
  source 1..3353: mol_type = genomic DNA
ggtaagactatattcttttttatgaattcatgaggatatgcctgccttgctagtgtatagttttgcttgccgctttgctagtgttgttggttgtgtttggccttggtgccaccctgtacataaaactcctattttccccttaatgaatgacatatctcctgcccctactttcaaaaaaaggagagacgacagaagtcttcaaaaaaagtgccatcaaagatgacacttggaaggaagaagttggcacaaacaatatgtgaaagaagatggcaacctacatttagaaggtggccttagaagtgtgtggagcaaccaaagggagttgaggcgaagttaaagatatttggtgtaacgaggaagaccaaagggctattaagggtgtttgaaactgttctgctccttgttttgcaactctgctccacaaacaatttatgaaacacattcaactccaccaactctactgctcaaaaaacttggagttgaagccaacccaactgattcggttgagcagcaaaagaggtgctctagaaattgaggtttcctatatcatcgtgaagttgcaaagtatttacccacctgtcactgattacataaaaaacattccattctgttcacttccccatacacaaaaaagcaacaatggtggcggcctatgggtagggcggcaacactgtgctggggagggacagcaacgaccctgcaccggctggagagggagtgtgactatgaccatcgccgccatcgtcgcttaggacctcgcccaggacctcgcacccaccgcccactcatccagccggctccttcgccacgccgcctcctccacgtcggtgggtagctctccccgtcacgcctcctcctcctggtggctcgtccctgccgctcctcatggccgatcagtgggctcacccctccctttcctcctcgcgtctggtcggtaggctcacccccacacctcctcgtggatagtcaggcgttgcaaccctaccgctcctcggtctgcgttgacgagcggggttgcactggcgaggatggagattgccgcctcatgcctcacgttgttccatcgagagagatgattgggataggagagaaacattagacttgggtcacctacatgtgggtcatttaaaacaaatccctgaaaaaatttgtcattcatggagttggagtcaaatgctaagccaaacacttttttctattccaactccacatgaagcagctccatggttgagttcgtggagtggagttgaatttgttggagtgtagcaatcccaaacactccctaaggaggaagaatgctacaaatgtgtgtaccatgacagaagtgtagacaacatagagaagtacaatttagcaaagaagatcacaaaacgacctgtaagtgtggcaaatggtagggcatacgaggatctttaccagcgtttgagtacgaagaaatgaaagaaggacatatatgggatgacttagggttcgtgagaggaagacaagggacttcaaccaagttaagtgcattaaggatgaaccagagcactcttggttaaggaggatgagattagacatagatgacaagagtattttgataaattatccaatgtggagaatgtggacacaacttttcacttagatgactcttttgatgacaccaataggagatttgtgcataggatccaagaatatgagggctttgatagtatcccaattgaggcatggagatgcatcgggcacatagctatattatggctaaccaagttgttcaatcatatcttccagtcaaacaagatgcctaatgagtggagaagtgtattggtactgatctacaagaataatatagatatttaaagttgtactaattaccggggaattaagttgatgagccgtagtataaagctataggagagacccatcatctaaatatctaatagaaataatgaggatctgtataaaccaatttggtttcatgaccggaaggtcaaccatggaacccattttcttaataagacaagtgatggagcaatatagcaagtagaagaagaacctacacatggttttcattgacttgaaaaagacttactataaaataccaaagaatgctatgtggtgaactttggacaaacataaaattccaaccaggtacattggactcgttaaggacacatacaacaatgttgtgactagtattcgaacaagtgataaagacataaatgacttcctaattagaataagactacattaaggatcaactttgagcccttacccttttggcttagtggtggataaggtcaaaatggacatacaaggggatatcccttggtgtatgtgttttgcggttgattttgtgctagttgatgaaagccatgcaagagtaaatagaaactagaattgtggtgggagactctagagtacatatattttagaccagctaaaaccgaatatatgagatgtgacttcagtacttctacacttgaggaagaagatgttagttcggaaggtcaagtagtggctagaaagtatatctttcactatttaggataaatactacagagagatgggggtatcgatacccatacaatcaaaacagggtggataaagtggtgccaagcatttggtggtatgacaagatggtaccactgaagctaaaagacaagttttataggacaacaattagatatattgtatgatgctgactgttggcatataagaatacgacatgttgataagtgttgtggaattacgtaaattttggatttatggccatacaaaaaaggatcaggtccggaacaaagatatataggctagtggtagcaccaattgaaggaaagcttgtctaacaccggttgagatagtttggacatgtccaacgggacctctaaagacaccagtggtgtagtggaattctaaagtgcattagcaatgggaggagaggcagtggaaggccggagttatcatggaaaggagctgtaaaaagagacttgaaatgatgaaatatacctaaagatttagccttgaatagaaagacatgaaaaatagatatctacgtgcctgaaccttgacttgtgatttttgttgggtttttttttcgaaagcaaaagattgagacctgtcagacaacctgaaggccaccctagccaggtagcctaccctaacttgcttgtgattgaaaggctttgttgttgttgttgttattgtacaacacggaaaaacaaaagtttgaaacaacatattacatactaattgtttttatttttggcagccttcttggatattattgtctgagtgcctgtaatgtttcttattgattgttttttttccgttgagttgcatattcttaaacaagttactactttttttacaag

SEQ ID NO: 1235 - DNA, 285 bp, Zea mays
  source 1..285: mol_type = genomic DNA
ggtaatatgcacgaaattatatttctatggaccaacagagttgcaaggctgttgatgttctaccttgcattgttgtaattattggcccatagttgttatacttctctgttgacctttgcaacaaatttattgaactcatgcattggtccatactccatagctgttatactcattgaccgaacaattcaaatacgttttccgaaaggatatgcattcatgtcagcattaccaatttagcatgttttctctgtttcctgtggtgacacattctctaattgtacacag

SEQ ID NO: 1236 - DNA, 85 bp, Zea mays
  source 1..85: mol_type = genomic DNA
ggtaattcttgtatatgcgaatggcatttacactgtgatggattgctagcaatatacttccccgcgtactgtttggaacgtgcag

SEQ ID NO: 1237 - DNA, 92 bp, Zea mays
  source 1..92: mol_type = genomic DNA
ggtacgagctcctgccgcgccgggcactccccaaacccaaaccctagctgggccttccagttttctgtaaagtggcggttgcctccgtgcag

SEQ ID NO: 1238 - DNA, 697 bp, Zea mays
  source 1..697: mol_type = genomic DNA
ggtacgccgccttacactgcggagaatgttatttcgtgttaatttggtggttgaaggctgcatggaaatgtggattttctgttctcgtgtttgcttagttgctccttgctgttcggtttcagaacttgagtccgcagtttcccgctagtgggaattttagtttactcttaaaaatcgttattatcgtgggggattaagagtgtttactcttttctttgttgtttatgtgccttgtgcgacactacgttgatcatttgggacggttatagagtttgatttccaataccactaagctgatttccatttgtttgtgtgacttcactattgtctacatgcactaattctgtggtagtgcacgggaattggatacaaattgaaattttagttttctgcatatctgcatagactcgataggattttgttttatgatcctatgttacttacttttatctgtttcatgtacttgtgctacaagtaatcctacaaaatgttctaaagaccagatatctctactgttatcattgtgtttgctgagagctctgtaagcttcatattgttttgaatgattatatgtaaggaacagaaatttaccttttcaaggtctcaaccctcatgtatgtgttaatcaacagacttgcaagaggtttaatggaagtttcattattcaactcattgtattctaatttccacggtacag

SEQ ID NO: 1239 - DNA, 703 bp, Zea mays
  source 1..703: mol_type = genomic DNA
tgtttgttctcagacaccatccaccagtttttagttctcagtagatatatagatggttctttgttattcatatttaattttgaagatagataaaccagtgatcaatctgtttcatcacccttctgtagaacacattaaaacaactacattattgataaatcacattagacgtttaacgttttaattaggaaaaaaaccactaaagtactaccatggtttttaaagcggtaaggcgagccaaggcgttggaccaccgcctggacgccgaggcgacgcctaggcgaggtaggcgggcaaggcgcctaggtgttggacctccgcctggacgcctaggcgacgccttaagaacagggagtactacatgtgttaactgatattttttatgtccataatccattgttgaaacattatggtaaaagacattgtcaaagcaaaatagtgaaataccccctaaactgttttatattgagtaattgctccattattagccaagtgatcatccatctcatgattcggatggtcccctgtaatggcagtaaatgcaaattgtaatcttacaactcaaagatataaagaaaacatgtgatttcttatttttctggatcataatgtttacactctagggtcgtagggcatattcctttttcccttgcttttgttctttttttttcttgtctgatacagtgttatttatcgatttcag

SEQ ID NO: 1240 - DNA, 2116 bp, Zea mays
  source 1..2116: mol_type = genomic DNA
ggtaaatttgcactgtcctaggtttctttccaaaataatttatattttttcttctcttgttgttgaactattgcattcgatacataagaaaaatgctggtttagctagtcttgttgaatcacaagagaattgggttgtttatgtatgatgtaataaactatcagttcagtgtgtgtaatgaatctgatgataatgggttatctcgagatgcagatcttagagttcttatattgtacagagttcatcaatagaaattttcaagtcagtagagtgtcctaatatttccaggaggaacttgagctgcagcctttcataaaggcgaggcaaatgaaatgacaataaatgagtggtattgagctactttactttaacccgatcgaggtggtattgagctactttacgaacgaggtggttgtggttacagaagactgaacccgagcggccatggaccctttttcctattaagctgcataaatcggtgcactctttcctttctatggctgttgaaactgtggtcgggaatgagaagcagactctgttttggaaggacaggtggctgcatgggcggtgcttagaggacctggcaccaaaaatctttgccttggtgcctaaaagaagaattaatcgacgcacagttcatgaagccttattaaatcacgagtgagttaaggatatacagggatccctatccgtggaggtgctcttggagttcctggatctggcagaatgtttagctaattttgagctgcagccggatgtcttggattctcacatctggaggctttccccttccggtcaatactcaagtaaatcggcgtgtgaaaatttcttccaaggctcaatttctttcagcccttgggagcgtatttggaaatcatgggcacctaacaagtgtaaattcttcatctggctcgctgcccacaagagatgttggactgcagatcgactcgccaagagaaatttgccgcacccagccacctgtccattctgcgaccaagcggacgagactattgaccatgtgctgacaaattgtgtgtttgcccggcagttttggtttaatcttctggggcgcttcaacgtacaaattcttccaccattggctgaagatgagagcctgtagggttggtggagcagagaaagcttgagagttcatgatctggcccaaagaggttttagttccctagttatcctaggtgcttggatcctatggaagcatcgtaatttgtgcgtgttcgaaggtgctgcgcctaatttggctagggccctgctccttgctgaagaagaggcttacttgtgggtgttggccagggctcgggggatttccttcctttcagccctagagcctgttgagtaatgtagctgcccttggtcgtttttttctggtgtagcacgtgcgtgtttgtttgtctaagtgttagctagtgctgttagtgtgtgggttgtactcggggttctcaaacccctttccttctttaatataatgatacacaactctcccgtgttcgagaaaaaaaactactttactttaaatacaaaatgagcatgggttgtcaagttaactatgctgttaagtttgtcctccttaccagtccatggtaccaaaacataaacaaggaagagttggcttcctatttcagcacttccatcttcccatagtgtaattgttgcacattgcttcagttatgttaattcgcatcagacatgcagacacttagggggtgtttgagagtgaagtttttccacagttttggaagaatactgcagcattctcaaaaattgcagtattacatacagaatggtgtttggcaagctagctaaagtctctgttttcaaaactgaaatattgcaaatactttagttgttttaaggtattctaaactaaggtctggacctcggtttctaaaattgtagtatttaaaactgtggtattgtcatgattgaagtgtactgtagtatttcaaaaactgtggtttccaaaaactttgttcccaaacagggctatgttatctgttcgtatatatcctataccagaaattcatgccttctctttcttcaaccaaactgttattcggctgagtgttgttgaaagctaacaatgatgctcaacactcgacag

SEQ ID NO: 1241 - DNA, 112 bp, Zea mays
  source 1..112: mol_type = genomic DNA
ggtaataatttctctgatcttgatgttatgagctgcatatagttatatggcattagttactttatcataagttttgcaatgctgatgctgctgctttctatctgatatgtag

SEQ ID NO: 1242 - DNA, 2094 bp, Zea mays
  source 1..2094: mol_type = genomic DNA
agtaagttcttgtcccgaagatacacctctctccaactttcaccagatataaaatgtttgcctgattttgtcttccatccagtaatataaatgcagtgcatatgtgttttcaatattgcacttcatgtttaataatatttaacaactagaattctatctattgatgaaggacaggcctggcgcagtggtgagaagccttcccactgagccaaaggtcctgtgttcaatgcagcctctctacaaaatgcaagggcaaggcttgcctcggctattccttccccagaccccactcatgcgggagccgctagcattgggtctatcctttttagaattgtatctattgataattctgtggtaaaaaaaaagggaactaccactgctgaagactactttcacatgcagctacagctacagcatatttttattgatatccaaagatgctatcattatccatgtttctaagggaaattgttcactgatactgttagagtgctgtataggagttacatgtttgcccctttttaatgggctttggcccacttgactctatataatacacacccaacccctggattagggttagggtttcatcatttccaacttggtaccagagccaattgtctcttccctccctcccaccccacagccgacgacctccttctcccacctctgccacagccctgccccctcccctatagccgccatggcttgctttcccttcctccccggcgtgtcctcccccctgcttcatcccgacgtgtcctcccccttgctcttgccactaccaccacctccaccatttggcatcgtcgtctcggtcaccctggacatgacgtgatgtcctagctctccagctgctcagatatctcttgtagtcggggctcctctgagcgcctctgtcatgcctgccagctcggccgtcattctcaccttcccttttccatttccatgtccagggttgctcaggcctttggtcttctctcattttctctggaatttccctctgtggctcaagtccgacaactttcccaccctcacccacttcttcgcttcatcgcttgggtgtctacccagttccgtcgtctggttcatgcactacagtgcgatcacgaccgcaagttcgacaacttcgcctctcgatccttctttctctcccacaacttcagttgcgcctctcacacccctacacttcccctcaaaacggctgggccgaacggattatccgcaccactaccaacatgatccgtcgtctcctctttcaggcgtctcttcctgcccttcaaggcgatgagtcaccctaaccctaatccaggggttgggtgtgtattatatagagtcaagtgcgccaaagcccattacaaaggggcaaacatgtaactcctatacaacacactaacagatactcctagctgaacaactttagtcaagcttgccttaatctagtgtgatatcacatgtagttttgggaaaaaatattatttcagtttttgttgggttcgacatatggaatgtctcatgttaaattcatcgttgagcgaaagggcctctagttgagttgattagatggtctgagtagcactccttaggtcctgagttcgaatcccagtgagagcgaatttcaggctgaggtaaaaaaaggtcactcactggttcccctggttgtgtacacatgagagattgacttgacctatgggggcagatccttgtgtaggggttgggagggctcaaagcacgagtaaagatccgatatatagggggcggaccctcatgctgcacggggggccagctttcatgacctttctcggtcggggctctgattgagcttcttcttaatataataccgtgggggcggtctttcccctaccgaccgagtttttttaacttcatcgttgagtgcatgaaccacaatttggattttgctacttggtcatggacatggtcctgtagtagtcaataatgaaaagaaaactcaactagaatcattaaagtatttttgtgaaataaaatctccttgaaactggctttctcccctgtgtatttcaaattaaattgtatatttctaaactaaaagccttgtttgatctggtttttcag

SEQ ID NO: 1243 - DNA, 83 bp, Zea mays
  source 1..83: mol_type = genomic DNA
cgtaggtgatagaagtatatttctggagtattcatagtgtttgtttttcctaccatgtaacagtaccattttacattgaacag

SEQ ID NO: 1244 - DNA, 229 bp, Zea mays
  source 1..229: mol_type = genomic DNA
agtaataacttgtatatattttttctgttcttatacaaagctttgaattcttgcattatttttttgaatgaatttgtatagggtgcatagagctttctataggatttgatgaatcgttgtgcttgtacttgtgatggtgattctcttcttccaaaagtatattagttatatgttttctctgttactgaacattcttgtaacacaatcgattgatcacttgatgctgcag

SEQ ID NO: 1245 - DNA, 162 bp, Zea mays
  source 1..162: mol_type = genomic DNA
ggtgtgtgtttgttcagttattatctacagaattctattcatgtgcttctaacatctggatattgtgtgtatattgtagatacatactcttaaatttacattacataccctggaatctctgaccattgttgcattccatttttgtatattttattttaccag

SEQ ID NO: 1246 - DNA, 473 bp, Zea mays
  source 1..473: mol_type = genomic DNA
cgtaagttgtgatgtaaccagtttgaaatttatcttccttatatgctttcttataagatactcctattattccatgtcttgttaattttcagtattagttatctcaaagccactttaccaagttccttctttagatactaccccttgtggatcaatgtccaaatataggacacaactacactgtattttgccataccaaatagtgattaccctttataaattgtatttccaagcatgtttttaatcttgcataaggtaaggccctgtgtttttttaagagaaaaagtctgagccctgttgctgcattgaacaggaaaagagaatgtggctgtgcaactatgtattatgtctctacaattctgtatgaatggtctacctcatgtttagataaacgatctcaaatcttttttacaatatttgccaggcgttctattctatactactatcgtaaactgtttcattcaactatgtag

SEQ ID NO: 1247 - DNA, 120 bp, Zea mays
  source 1..120: mol_type = genomic DNA
ggtaaagtccctgcttcaagatttccttctggtggtgaaaattgtatcctatcttagtttcatttcagatgtcagcaatttcagctataatcaggtaccatttgatgttccacggtgcag

SEQ ID NO: 1248 - DNA, 555 bp, Zea mays
  source 1..555: mol_type = genomic DNA
gtacgtcccacgcccccatccccgtctaagcgtgcgtgacctgttcgagtgcttctcacgcgctggccgcggtggttgttcgagatcagcgccgcgggtgctctgatctgtgctgtttgtggaaatggcggcaaggccaggtggctcgtcttaggacctccgttttagggctcgtactcgtaggattctcacaagtcatgcttatgtcactgtgagaactttagaggtttctattggtattggtggatgggtacggaattcagctttccgtcaaatgtcaacacgttatttctagtgttagatttagttgtaattaatgagaactccacactagaaactgaatgaacatttgaacctacaaggctacaacacccatgtgtcatgtgcttcattatgctggttgctggaaactgtttctcgaacctataattgtgcagcccttaaaagcacccactgtaacacttatgtttccgtctgtactggtaggatgcagtatttgccattgctgtttatatgggaaggctaaattaaacaagagccagctctaactgcagg

SEQ ID NO: 1249 - DNA, 152 bp, Zea mays
  source 1..152: mol_type = genomic DNA
gtagagttgcgctgtgtatatctgtttgcaccttaggttccactggtcgaaaccaatcgtaggctttgtagacttgcttgttttgtcactaggccaattgctccttttctcgttttggaaaatgctcaaatgcctttttatattttcatagg

SEQ ID NO: 1250 - DNA, 186 bp, Zea mays
  source 1..186: mol_type = genomic DNA
gttggttatctggctctcatattttcattttctttatttgcatttttttctattctcccatttctctgttgattctacatattgtactcggagtattttgtggtgcttacttgttattatgaaacatttaaacggttattctcctgccatttgtctaatttgtcctgttgcccatgttcatttagg

SEQ ID NO: 1251 - DNA, 211 bp, Zea mays
  source 1..211: mol_type = genomic DNA
gtaattcgatatattcttcttcagctgttacattggttcatgtcatgttttgtcacattttgcagcctttgtgcaatctttagttacttgtgcttgtccattgtggcacttcaacaaaataattagagaaactagttaaattgatgtttgttttgggcggcaatcactgaaccattcagttcacaatatattggatctactatgtggcagg

SEQ ID NO: 1252 - DNA, 83 bp, Zea mays
  source 1..83: mol_type = genomic DNA
gtattacctgttgctgtaggaagggtggttaactctttaagtcttcatgaagtttgaatcctttagttatgaaatattgcaga

SEQ ID NO: 1253 - DNA, 495 bp, Zea mays
  source 1..495: mol_type = genomic DNA
gtacagttttgttaagtgattttttttctgaagtgtggatatatcttggtcaaatcgaatgatgacatcatggactaaaatgtgccaagtgctgatgtgtaatgacttaggagttacatggaatggccatgtgacattttgaatcaagaagtcacaataaaacatggcagtgtctgaccgtgcattctctgtccatttttctacaggaagttgctggaaacatatgtaattttaagatgtgttgtttcattgatacttcaaacaaagcacatttgtatccacctttctccttatacgctcctatataacatgtattggccgacaatgtcatgaactttaactacaaatttgtaaatgggttcttgtacatacaggttatttgttagttaataacttttagttgaagtaaaatatggtttgatattgttttattttgtgtaccatgaaattatttgttcgctgtcttattttatttgatcctgtcatggattcagg

SEQ ID NO: 1254 - DNA, 99 bp, Zea mays
  source 1..99: mol_type = genomic DNA
gttatcccttttttttgcaaccattcaggttatcggacaactattttttttgttccattggctggcattaaaatttgtaaacatttcaattgcaacagg

SEQ ID NO: 1255 - DNA, 112 bp, Zea mays
  source 1..112: mol_type = genomic DNA
gtaaaacgatctcttcctaccttccctccctccctaacctttgttggatttcagtcttttatttattttgaaaaaatggataatgctgtactaaatgacaatgtgctacagg

SEQ ID NO: 1256 - DNA, 350 bp, Zea mays
  source 1..350: mol_type = genomic DNA
gtaagaacatatttcagtgttttgaatttcctagctcattgacttgaattgtttagtgcatatgcatattttgagctgtttacatagctgttgtttggtcaagtaatctattccctgttaagttggtgtggtcaagttcagtaacctttcttatgtcaacaactgattctgatcttgcagttgcaaagaaatttagataccatgtcactatgattgctcacatgttttcttaaataaaatgacatacatatgtatttttttcttgagaacagcactgtcaacaatgtacaaccttgtggatgatttcaatcttttgtgcaacatactgatctctgatctctttatgcagg

SEQ ID NO: 1257 - DNA, 77 bp, Zea mays
  source 1..77: mol_type = genomic DNA
gtaagtttaatgtaatcaaaacttgtcctttgtattatataaaatataaaacgctgagcaatctgttccaaatcagg

SEQ ID NO: 1258 - DNA, 353 bp, Zea mays
  source 1..353: mol_type = genomic DNA
gtaccatctcacagtattaggcactttttatgcagaaacaatttgacgcacaatcatattgaattgattatccacttgaaaccttgaacacttgctttcttttgataaccatgtggactacaccaattattataaacgattcacaatctctgctagatgttgaaaatgatactaaatccctcatttttcgtatctattgctggcaaataacatcttcacactttaaggctctactttaatgttatatcagtactgataaattcttggacaactgtcacttttagaagcaaataattatggtgctgtaattcctcacgtactatgtttagtctgataattttggaaattgcagt

SEQ ID NO: 1259 - DNA, 944 bp, Zea mays
  source 1..944: mol_type = genomic DNA
ggtgattattctccctcttgctcttcgatctcatcttctctgtctccgcggaatcgtactaatctcccgacagatcgcctcaccaagtcaccagtcaccaggcctttgactggtgttgtccggtaactttttttttttgtggtttctacgtctggcgcgctgctgatttttccgcggttctgtttggtttgtggtgatttgctgcaagggtaaaggaattcgaactttgctgggatggtaggattatgctaaggcatgctggctagctatgtttggattgtgctatggcgcagtgccgacagtacccgactttgctgccagtggtgtctcctattatatgattttttttttcaaataacaagctacgaatttactcgctgcccaaaaaccaaaaacaaatcgtagaaaccgctgtccgctgagcttgttggttccccgttgacctctagttgccagggtagtaagtaggaggcgtaatttttttgattagaaatgtccgtcaagcagagttccaccaagcatatgttgatagagcaggatagtgctggttttattgcttcgggccacagcagcagcaaggccagatgggaaaaaatatcccaaaaggaattattttcctatgaagttgtgtgtgaccaatggtgatatccgctttattttgtagaaaactgagatcatcggggagcagaatttctctgactccgcatctacatctatacgctcgaatacttagatctttggtattttaaggctgctgtactgctgtagaaacataaagcttttccctatgcatagaagtcacaattaaacgacagacaattatcaaaacataaagcttttcccttaaaccatgagcagaaagtgtattttgattccccgaccaggctgcataactgcatttttctatgaatgtgtactgaacgctgaactttggtctgttacag

SEQ ID NO: 1260 - DNA, 86 bp, Zea mays
  source 1..86: mol_type = genomic DNA
ggttgttatctcgttcagaagtcttttccaacaaagcaactctactcctgtgacctaattgttgctcaactcctcaatatttacag

SEQ ID NO: 1261 - DNA, 108 bp, Zea mays
  source 1..108: mol_type = genomic DNA
ggtaagatggctgtcgcctcagatatatatagtgatatgcactacaaagatcatacatacatacggcaatcctgacacggtctctttgtcaaatatctctgtgtgcag

SEQ ID NO: 1262 - DNA, 824 bp, Zea mays
  source 1..824: mol_type = genomic DNA
cgtaagcacttctaaactgccctcgtagtcgagttttggatctgtgctgcggcacagcatcacttgtaatatgttagggcacctttgttgggatgtttgccaagttctggattgtttttttttcgcgatgtaaccggcaatgcgactggatctgctgattttggacctgggaatgtcctggtccagtgcttggttatctctattttgcaacgaagattattagatcggtttggtggttctgcgtacttgagtgggatctctagtgtcggatctgggggaaatttcgtggtccttttatttttacgacactcgacctcggagactaatcactcggtttcggaaatgtgactgttagacctttgcgtgtttatcatcatagcttggtacagtattggactacaaatttcaggactgaaaactagatctggaactgacatccccccccccccccccccaccatatagaagatttagttcatgaaattatttataatcacgaggaaatatcgattcgatatgctataaatatggatgcatttagtactcagtaggcgattcagtgattgatgtgtgtaagacggtttttggaaccccatatattgttgggttctatgtggtccgcgcaggagttcagtgacatttcggatctgaacagcagtgacaatgtgagcttgctttctggctcagtggtaaatgcctatacatccatgatctaatcaacctgagggagggtactgacagtagtaggcgtttttttagtattttaagtttgagtgcttgctgcagtatctaaaactaattcctatgcgcttcccttgtttctag

SEQ ID NO: 1263 - DNA, 536 bp, Zea mays
  source 1..536: mol_type = genomic DNA
ggtacttgagcttgttgatgttaagctgattgcttatagttgctagaaatatctgttgcctgtgcttttttcactatgatgcaatacattgtatttattcatttgattgatgccatccatgggactagaactataatatcttgttattatgaacctgcccttgctctgaaacctaagccatttcactcgttttagttcatgtcttatatttctgcattatacgtcgatgccattggtacttattggttattgctgattgcttagtaattttacatttgagtatctatcttgtatgctgttgtcattttttgacacaccaccagaaacattttttctattcaatttataccaaagtttagtatttcccttgcacttgttgcttgaacaattgccatacacaaaaagctgttctgactgtgattactaaatcacctatgtgtttcatgtattttggttgccattcttttccaatcacccaagatactaagcttaattatcatgcatttagcactaactcggtctatttgtttcttcag

SEQ ID NO: 1264 - DNA, 114 bp, Zea mays
  source 1..114: mol_type = genomic DNA
tgtaagcagactctttctttctcaattttatctgttcagcattgcagatatttccctgcttgtactagtgtattactgtgtgttttaacactgtgtatttgttatttcctgcag

SEQ ID NO: 1265 - DNA, 123 bp, Zea mays
  source 1..123: mol_type = genomic DNA
ggtgagttctccgcacgatcggctgggacaggggaacgacgcgcgcaactgtgtggcctgggggggcattaaacgcttaaacggcgatcaatcgtcgcttaatcgattgctgtcgggtactcc

SEQ ID NO: 1266 - DNA, 104 bp, Zea mays
  source 1..104: mol_type = genomic DNA
gtccttgttactggtggaacccatgtttaaccctccagcgatacagcatgcaactgatgagctagtgttcgaggagtttggcttcaactcgctttatgttgcag

SEQ ID NO: 1267 - DNA, 717 bp, Zea mays
  source 1..717: mol_type = genomic DNA
ggtcagctgtcttcataacctttcatgtgccaacccttcttttgtttgtttagggttaatgtttcatgtaagttctgaataaatttaaaggttgggccatctaggaacatctagtgtttgaactttgtctgtttaaccaatttaagtgcacacattgataaccttttttgacaaactggattttgtagcttccagaactagaggtgttgtgcatgcacacatgtttttgtgggagctggtgaactagcattttgagctgaaacttcactataggcattagaaggcttgaaagaccttagcatttgaattttaagaacacaaaacttatctttgtcaaacaaacaaatagataactaacctaaggacactggaatgtgtttttgggactatcctatacttgggacttttgttttctcatattgttgtttatagtgtcttcgtaaagcaccctgaatttacaatgctaactccagaatccagatgccattaatgtcgacggatgctaagagaatgttattaagtacatgtttcctttgcttgaaagttgtttagaggcattttcttaaaatatattgtgctgtattagggaagaaagaatgagttaaatgatgtaaaatcacattcctttgaaatggggacctactaatgagttgactaaactatgggattttatgctactcaaatctcttagcagcttgctgtgcaatttctgggcag

SEQ ID NO: 1268 - DNA, 75 bp, Zea mays
  source 1..75: mol_type = genomic DNA
tgtaacatcctcgcctccttggtattggctgccatgtggtattatgatatcattgatgagattttaactctgtag

SEQ ID NO: 1269 - DNA, 543 bp, Zea mays
  source 1..543: mol_type = genomic DNA
ggttagtgacaatgttatgtcctgtgtacttttgctcataagattttgaatatattctctcatatgtgctctcaagttattgaacagcatatcggtctcatgctacttttcagtgtatttcctaaaaccattgcaaagcacaataattatttcttcccatctgcacatgaccaaccaccaattcattttcctgatggggaggatttgcccttaacattggaatgcaaaaccattgacatacctaatctcaattactagtttactactcggataatatcccttgccagtgactcaaaagtagcaattcagttgaccttcataacttcatatgcatattaatcacatcttggtgaatttacatcaactattctgtttttcctttaacattggtaaacaatagaacagaagagtttcattgttttgtccatctttcttccgcacagtagtaatgttagtttcataacaattgtactctgctatgttagcacattatctaagcttctcatttgttgccatactaatctctgctgtgcatatttgtag

SEQ ID NO: 1270 - DNA, 88 bp, Zea mays
  source 1..88: mol_type = genomic DNA
ggtatcatttccatttacatacatctgcacctgcattgatctttgaacatggtatgcatgtgagttcacattgttgggatgtttccag

SEQ ID NO: 1271 - DNA, 120 bp, Zea mays
  source 1..120: mol_type = genomic DNA
tgtaagttgtttctttagcattatagacagtatatgcctttattttgtcatgagttggatacacttgttatttggtttcttttgaggtagtcactgagattgcataaactgcattgacag

SEQ ID NO: 1272 - DNA, 117 bp, Zea mays
  source 1..117: mol_type = genomic DNA
agtatgtctctcgcaccccctcttgcatgcccaattttattggtggaaaatgctgaaaaatgaatcataccgtgcatatgattggcattgctgttaacaattgtttgctatgtgtag

SEQ ID NO: 1273 - DNA, 571 bp, Hordeum vulgare
  source 1..571: mol_type = genomic DNA
gtaacgaccatctcatgccccccctcctcctcctccccgccccgatcgatcattctctccccagatgagatccgccccgcattgcgcgcccccttgcgctcaccatcaggcccgatcgatccgatctcgcggcgggccccggcgccggctccccctcttcccgccgcggatccgaccggatctcgcggaatgggagcgagcgagcgcccgccgcgtttttttttattttcgtgccgccgcgggaatgtagatctgccgcccgcgatctgggccgtttcgggtgccggagcgctccgatccgcgccgcggtgccagagaaccatgctctctctgttcccttattaactgttcttgtcgctaagcctcgcggttaacatgccagccattgcggttaggggttcctcgtgaactgattgatagtactactcatcatgtttcttcgaaggagaaaaataataatctctgcatttatttagccagcgtccttcactgctaggatgcgtagattctcctttgatcgaccgatcgatgtgtaataataaccgtggcttcctgcgagcttctgctgtag

SEQ ID NO: 1274 - DNA, 101 bp, Hordeum vulgare
  source 1..101: mol_type = genomic DNA
gtgagccgctgcatcccacgagcgttcttgcatctttggttcagggaaatgccgcagtgctctttgtgacataacacttgtggtggtgatgatgcttgcag

SEQ ID NO: 1275 - DNA, 83 bp, Oryza sativa; identical to SEQ ID NO: 344
  source 1..83: mol_type = genomic DNA

SEQ ID NO: 1276 - DNA, 249 bp, Oryza sativa; identical to SEQ ID NO: 345
  source 1..249: mol_type = genomic DNA

SEQ ID NO: 1277 - DNA, 330 bp, Glycine max; identical to SEQ ID NO: 676
  source 1..330: mol_type = genomic DNA

SEQ ID NO: 1278 - DNA, 571 bp, Hordeum vulgare; identical to SEQ ID NO: 1273
  source 1..571: mol_type = genomic DNA

SEQ ID NO: 1279 - DNA, 101 bp, Hordeum vulgare; identical to SEQ ID NO: 1274
  source 1..101: mol_type = genomic DNA

SEQ ID NO: 1280 - DNA, 132 bp, Solanum lycopersicum; identical to SEQ ID NO: 807
  source 1..132: mol_type = genomic DNA

SEQ ID NO: 1281 - DNA, 111 bp, Sorghum bicolor; identical to SEQ ID NO: 1000
  source 1..111: mol_type = genomic DNA

SEQ ID NO: 1282 - DNA, 119 bp, Sorghum bicolor; identical to SEQ ID NO: 1001
  source 1..119: mol_type = genomic DNA

SEQ ID NO: 1283 - DNA, 93 bp, Zea mays
  source 1..93: mol_type = genomic DNA
gtgagctgattccgttctctgcttaacaatttccaaatccgatttgctcctgcagtccgttatctctaatatctgtggcttcccctctctcag

SEQ ID NO: 1284 - DNA, 75 bp, Zea mays
  source 1..75: mol_type = genomic DNA
gtaaaacaaacaaacaaatttcgcattcgcatttcctcaatcaaggtctgctcacgattttgcttgcgactgcag

SEQ ID NO: 1285 - RNA, 23 nt, synthetic construct
  source 1..23: mol_type = other RNA
aagctgtttggatctcagggtgg

SEQ ID NO: 1286 - RNA, 23 nt, synthetic construct
  source 1..23: mol_type = other RNA
aaatgcagcatttcggtaaacgg

SEQ ID NO: 1287 - RNA, 23 nt, synthetic construct
  source 1..23: mol_type = other RNA
atttcttggtagcaaaactgagg

SEQ ID NO: 1288 - RNA, 23 nt, synthetic construct
  source 1..23: mol_type = other RNA
tcttggtagcaaaactgaggtgg

SEQ ID NO: 1289 - RNA, 23 nt, synthetic construct
  source 1..23: mol_type = other RNA
acattcgacactgaactaaaagg

SEQ ID NO: 1290 - RNA, 23 nt, synthetic construct
  source 1..23: mol_type = other RNA
cactgaactaaaaggctgtgagg

SEQ ID NO: 1291 - RNA, 23 nt, synthetic construct
  source 1..23: mol_type = other RNA
tcataggcagttctcataaatgg

SEQ ID NO: 1292 - RNA, 23 nt, synthetic construct
  source 1..23: mol_type = other RNA
cactccatgccaacagaattagg

SEQ ID NO: 1293 - RNA, 23 nt, synthetic construct
  source 1..23: mol_type = other RNA
tttgaacatcctaattctgttgg

SEQ ID NO: 1294 - RNA, 23 nt, synthetic construct
  source 1..23: mol_type = other RNA
acatcctaattctgttggcatgg

SEQ ID NO: 1295 - RNA, 23 nt, synthetic construct
  source 1..23: mol_type = other RNA
acagactttatagatgctaatgg

SEQ ID NO: 1296 - RNA, 23 nt, synthetic construct
  source 1..23: mol_type = other RNA
atcggatcgatcgggcctgatgg

SEQ ID NO: 1297 - RNA, 23 nt, synthetic construct
  source 1..23: mol_type = other RNA
gcagatctacattcccgcggcgg

SEQ ID NO: 1298 - RNA, 23 nt, synthetic construct
  source 1..23: mol_type = other RNA
gcggcagatctacattcccgcgg

SEQ ID NO: 1299 - RNA, 23 nt, synthetic construct
  source 1..23: mol_type = other RNA
tagatctgccgcccgcgatctgg

SEQ ID NO: 1300 - RNA, 23 nt, synthetic construct
  source 1..23: mol_type = other RNA
agatctgccgcccgcgatctggg

SEQ ID NO: 1301 - RNA, 22 nt, synthetic construct
  source 1..22: mol_type = other RNA
tctggcaccgcggcgcggatcg

SEQ ID NO: 1302 - RNA, 23 nt, synthetic construct
  source 1..23: mol_type = other RNA
tggctggcatgttaaccgcgagg

SEQ ID NO: 1303 - RNA, 23 nt, synthetic construct
  source 1..23: mol_type = other RNA
gttcttgtcgctaagcctcgcgg

SEQ ID NO: 1304 - RNA, 23 nt, synthetic construct
  source 1..23: mol_type = other RNA
gaacccctaaccgcaatggctgg

SEQ ID NO: 1305 - RNA, 23 nt, synthetic construct
  source 1..23: mol_type = other RNA
acatgccagccattgcggttagg

SEQ ID NO: 1306 - RNA, 23 nt, synthetic construct
  source 1..23: mol_type = other RNA
gtactatcaatcagttcacgagg

SEQ ID NO: 1307 - RNA, 23 nt, synthetic construct
  source 1..23: mol_type = other RNA
tcgatgtgtaataataaccgtgg

SEQ ID NO: 1308 - RNA, 23 nt, synthetic construct
  source 1..23: mol_type = other RNA
aaagatgcaagaacgctcgtggg

SEQ ID NO: 1309 - RNA, 23 nt, synthetic construct
  source 1..23: mol_type = other RNA
atgattcaaaatcgtgtctatgg

SEQ ID NO: 1310 - RNA, 23 nt, synthetic construct
  source 1..23: mol_type = other RNA
ctttgcgctaaaaaaattggagg

SEQ ID NO: 1311 - RNA, 23 nt, synthetic construct
  source 1..23: mol_type = other RNA
ctcttaattatggattgctgtgg

SEQ ID NO: 1312 - RNA, 23 nt, synthetic construct
  source 1..23: mol_type = other RNA
gcaatatttgccatagcaactgg

SEQ ID NO: 1313 - RNA, 23 nt, synthetic construct
  source 1..23: mol_type = other RNA
tgtactgaaaaaatatgctctgg

SEQ ID NO: 1314 - RNA, 23 nt, synthetic construct
  source 1..23: mol_type = other RNA
tccgttatctctaatatctgtgg

SEQ ID NO: 1315 - RNA, 23 nt, synthetic construct
  source 1..23: mol_type = other RNA
tcgtgagcagaccttgattgagg

SEQ ID NO: 1316 - DNA, 1275 bp, synthetic construct
  source 1..1275: mol_type = other DNA
atgcctgacagagcacaggtaatcatacggattgttcctggaggaggcaccaaaacgctgcaacagatcatcaaccaacttgagtatttgagcaggaaaggaaaactagagcttcagcgatctgcaagacacctggacattcctgtacctcccgatcagatcagagagttagcacaatcatgggttacagaggctggcatttacgatgagtctcaatctgatgacgacaggcagcaagatctgacgacacatatcattgtctccttcccagcggggacagatcaaactgccgcttatgaggccagccgagaatgggctgcagagatgtttggaagtggttatggtggggggcgctacaactacttgaccgcttaccatgttgatagagatcatccacacttgcacgtcgtagtgaatagaagggaactccttggccaaggatggcttaaaatttcgcgccggcatcctcagttgaattatgatggtctccgtaagaagatggctgagatctcactccgtcacggaattgtgttagatgctacttcccgagcagaaagagggattgctgagaggcccataacatatgctgaatacagaagattagaaagaatgcaagctcagaagattcagtttgaagacactgattttgatgaaacatcaccagaagaggatcgcagggatctttctcagtctttcgatcctttcaggagtgatgcatcagccggagaacccgaccgagctactagacacgacaaacaaccacttgagcctcatgcaagattccaagaacctgctggttcctctatcaaagctgatgcccgaataagggttccgttggagtctgagagaggggcgcagccatcagcgtccaagataccagtgaccggtcattttggtattgaaacttcttatgtggctgaagcatcagttccgaagcagagtggaaattcagacacaagcagaccagtcacggatgttgctatgcatactgtggagcggcaacaaagatcaaagagaaggcatgatgaagaagctggaccgtcgggcgccaatcggaaacgtctcaaggcggctcaagtggactctgaagcaaatgttggtgaaccggatggaagagacgattcgaacaaagcggcagatccagttagtgctagtataagaacagaacaacctgaagcaagcccgacctgtcctcgtgatcgtcatgacggtgagctaggggagcgtaagagagctaggggaaacagacgagatgatggaaggggtggtacttga

SEQ ID NO: 1317 - protein, 424 aa, synthetic construct
MPDRAQVIIRIVPGGGTKTLQQIINQLEYLSRKGKLELQRSARHLDIPVPPDQIRELAQSWVTEAGIYDESQSDDDRQQDLTTHIIVSFPAGTDQTAAYEASREWAAEMFGSGYGGGRYNYLTAYHVDRDHPHLHVVVNRRELLGQGWLKISRRHPQLNYDGLRKKMAEISLRHGIVLDATSRAERGIAERPITYAEYRRLERMQAQKIQFEDTDFDETSPEEDRRDLSQSFDPFRSDASAGEPDRATRHDKQPLEPHARFQEPAGSSIKADARIRVPLESERGAQPSASKIPVTGHFGIETSYVAEASVPKQSGNSDTSRPVTDVAMHTVERQQRSKRRHDEEAGPSGANRKRLKAAQVDSEANVGEPDGRDDSNKAADPVSASIRTEQPEASPTCPRDRHDGELGERKRARGNRRDDGRGGT

SEQ ID NO: 1318 - DNA, 174 bp, Pseudomonas syringae
  source 1..174: mol_type = genomic DNA
atgccgagctcttcgagcttgctcatcgatgatcacgccttgttccgttccagcgtggccctgatgttggaaatgaggctgccacggacgacggtcagcgaagccagcaggatcgaggaggcgtctgcccaggcgtgccggcccccgatctcatcttgctcgatttgcaaatga

SEQ ID NO: 1319 - DNA, 963 bp, Pseudomonas syringae
  source 1..963: mol_type = genomic DNA
atgggatgtatatcatcgaaacctcaggtaatgtctccttcccgtcattactcttcacctgacgcggagcctgctaccgctagaacatcgcatcgtaggtcagctcgttatggtgaattatcgggccctccagcacaaaccggcttaacgtattatcagcaatcgttaattggcgtagctcgctggcccgatcctcagtataaccaggaccatcttcctcatcagatggaatatggtcgttccttcttcgatgcgtctcgccacgcaggtgctggcattgcttcgggtcaagttcaagcatttagccaattgtgggccttggcacagcgctggagaagcgaagctgctggcggagattacgaaacttttggcgaggaaagcgagcgatacccaacttacaatcacaatccgacaacgcctctggcaaatcaatatgcttacattcttgatcgttacagaaatcgagaggatggtgaattttccgaggatgttgagggcgttccaacgcacgagtttcctctgcgagacgagataaatggtaagcctataactctctcaactgtcgtggtaagtgcagaccctgatgcgaatagatatgatagtagatactctgctataaggcaccttgaagctggcgagcctttttatataaggcacactttttctgccgatgtgccagaagtgcttgctcatgtagaagaactttataatcaagcgttggatgcgagcgtttccgattcacaagctttaagtatattaggtgaaatacattggtgggttgctaatgctatgcctgatcataggggcagtgcagcaaaaactgagttctctgtccgtgccatagcaatggcgcgaggtatggagttaccgcctatgagacacggcatagtagcagatctagaagcgatgaccacttctcgtgaggcgttcgttaggcactacaataacttttttgatcgctga

SEQ ID NO: 1320 - DNA, 843 bp, Pseudomonas syringae
  source 1..843: mol_type = genomic DNA
gtgttgtttgtgggtaatatttgtggtacttccggctcccattatgtatatagtccgccagtaagccctcgacatgtatcgggttcgtccacaccggtgcacagtgtaggcggtcaaggcctaacctcggtgtatcaactttccgctgaggcacgagatgattttcttgatcgctttgacccaatgcgaaacctgggtctgaactcggaaacgccgctttacaggaccacggataccagctggcgcaatgttattgcgcaagtaagaaatcctgacgaagatccgcgcatcgactatctgctgacaatggcagaagaaatttacaaggcatcaagcacttttagaaaaagaatgaacgcagttgcgggcgaaggtggtgtcacgataaggatcgtgccagacagtgagatcggccattcctttgggcatgccgcaacaagaccggcaactcggtctattgccttgacagagacaacagcaagcaacgttcaaggaagccactatcaatctctcaatatattattggttgaactctcaaacctgagccgggccaatgaaattacggagaaccgttccagtttccagcagggacgaataggtcagcggcgcgcggctcataacgccgaaagagcagagtatggaacgatcgaagacatggtcaaatattttacggaggctcgacctgtcatagaatcactaggctacgggaatccgtacgccgcacacgactacggcggcggaatcgtgccagcataccgatcattcgaagattactacgcaacagcgctttcaagcggccatactgacgttcaccttaacaactattctcggtctgatgaatag

SEQ ID NO: 1321 - DNA, 1149 bp, Pseudomonas syringae
  source 1..1149: mol_type = genomic DNA
atgagaattcacagttctggtcatggcatctgcgcaccagtgtcctctgcagaaaccgttgaaaaggccgtgcaatcatcggcccaagcgcagaatgaagcgtctcacagcggtccatcagaacatcctgaatcccgctcctgtgaggcacgcccgaactacccttattcgtcagtcaaaacacggttaccccctgttgcgtctgcagggcagtcgctgtctgagacaccctcttcattgcctggctacctgctgttacgtcggcttgatcgtcgtcagctggaccaggacgcaataaaggggcttattcctgctgatgaagcagtgggcgaagcgcgccgcgcgttgcccttcggcaggggcaatattgatgtggatgcgcaacgcacccatctgcaaagcggagcccgcacactcgcggcaaggcgcctgagaaaagacgccgaggcggcgggtcatgagccgatgcccgagaacgaagacatgaactggcatgtgctggttgccatgtcgggtcaggtgttcggtgcgggcaactgtggcgaacatgcgcgtatagcgagctttgcctacggtgcactggctcaggagaaaggacggactggcgatgaaaatattcatctggctgcgcagagcggggaagatcatgtctgggctgaaacggacgattccagcgctggctcttcgcctattgtcatggacccctggtcaaacggtcctgccgtttttgcagaggacagtcggtttgccaaacacaggagcgcggtagagcgaacggattcgttcacgctttcaacggcagccgaagcaggcaagattacccgagagacagccgagaaggcgctgacacaggcaaccagccgtttgcagaaacgtcttgctgatcagcaggcgcaagtctcgccggttgaaggtggtcgctatcgacaagaaaactcggtgcttgatgatgcgttcgcccgacgagtcagtgatacgttgaacaatgccgatccacggcgtgcattgcaggtggaaatcgaggcgtccggagtcgcaatgtcgctgggtgcccaagacatcaagacggtcgtccaacaggcgccaaaggtggtcaggcaagccagaggcgtcgcatctgctaaaggtatgtctccgcgagcaacctga

SEQ ID NO: 1322 - DNA, 1110 bp, Pseudomonas syringae
  source 1..1110: mol_type = genomic DNA
atgggaaatgcatgcgtcagcggatctcgaatgtcgcaccaggtctattcgcctgaccgtgcagacacaccttctcgaagcgagcgcaacactccggatcgcaggcagagatcggcaggcgacgcagagagaactcaaagcatgcgactgcagcagaaaataaacgatttgaaaccttacgtacggcacgcacgaggtccaattaaagcttatgggcaagcagcccttgaccgtgcttcaggaaagaagacaagtgtgagttttgcagagttggacgccacccatctcgacgcaatggtcgacatcgagaaccaacgaaatcccggcctcaacctcaggcacttcagagaccacaaagagctcattcaggcactccaaagcgatggccccagcgcatttcgggcaatattcccacaaaccagtcctggaaccggacagacagtcaggcatcacgtaatggctgatgtccgcctgcatcagggtagagctccaaccattataattactgagccagccgtcatagtcggttcacagtttcaacagcttcgacagcacaatctgacccttgaggatttgagaaagagtggtgtaccactctcgcacgtcgccattcttgaaacgcaggcgcaaaaaacgaaagacgactgcgttatgtactccctgaattacgcaatcaaagcctataaaaatgcaaatcaatttgatgacattcatcaaggtcttcagcgtggcacattaccaaccgaagacgagtccagaaccaagaccaccctcggcgcactcgaaaaaaacagctcatactcaatgatgcacgagggcactcatgcagcattcggtgcggattttctgccagtggacttttataagcatggcgcttcgctgacgcaggcgagagagctaatgaagcggccagatggacgtatggctggaagagtcaacagcgaagaccacagagaggctgaaaacctgattcaacgcaaccaggcatttcgcatgacacgcagtgttctactcgacgatggtacaccgtcaagcacccaattcagcgcgtccatcgacggcttcagactccaggaaataaaacgagtactggccgcagcacagcgctaa

SEQ ID NO: 1323 - DNA, 1467 bp, Ralstonia solanacearum
  source 1..1467: mol_type = genomic DNA
atgaaggtcagtagcgcaaacgcaggcgtatccgccagttcggcagacaacactagcgcgcgcccctcacagacgagtgccgatacaaccgcattgggccgccgccgcagggcaccagaggatgcaccgggcagccctcctgcacgcagacagcgacaagactctccagaagactccgcgcaaaccatgttccgccgagctggcatgactgcgctgccgccatccccggctacttctgaacatgtgccactcctagacaatcggccgacgctcgaacggatgggtgtggatcatcctttgccggggcgcacgtggtacgagaccgggcacaccactgcatcgcttgctgatcgaacttccaccgcatctgcggcccaggtggccagctcgtcacggagtgctggtcccgcaacagccgcaaggccccagcccacgcgtacatcggctggccagcaagcaaccgtggaccggttgcggactcaggtcacgggattcctcagcggcgcactgggaaaactgcaagctctgagcgcacagaacatggatccagagttggcccaattccgcgttctggacgtggaccgggcgatcatgccgctgctgatcgttgccgaaaacgctcgcaatccgggactcaatctcgtgcccctgcatatggatatggccgaagacgaggaggtgcgcacccaacctccaatggcggggtcgcgacacatcgctgagttcgttgcgtcggcccgacctggacggtaccgcgcggttatcgacgacggttctcacaccagagccgcagatattcgcaaggacgcctctggtacgagcgtgatcgttgtcgatcccctccgaaaggaaaaagatgaaagcgcgtacgtcgattacgccgacaacgtgaatatggaattcggagagcatgcgaaatgcgcgttcatcccggtcgacattcagaagtccttcttcgattgccggatactctccctgtcacttgcactcaagatgcatgacaaggacgacgcgtttgccgcattccacgagacgctgagaaatggtggcgatccctcacaccacgtgtcccgcgcccaacagacggaggaacttggcgctacccttgtgcttgatggtgcgccactggtcgacgcccgtatgatgaaacatggtcaagccgcaagctctgtctctcggtatctcggaaaccatcccgagcagtcaaccgtacctgttaataagcgcaatgaaaccttgggcgagcgaacaacccgccatctcgtcaaacgcaaggtgcgcaaccgcgctgattccgaaggccgcgtgacgagcggagaaacgaaggagatcacgttcagcaactccgtcgagcaaaagcggattgcgctgcttaaccgagccgcttcctatgtgaattcagcgccgccgcctgttgtaatgcgtatggcaaaactgctgcaggattccctattggataccaactga

SEQ ID NO: 1324 - DNA, 1293 bp, Ralstonia solanacearum
  source 1..1293: mol_type = genomic DNA
atgcctcttaccaagatcaatccttcggccagcgccgataccaccttgcctgcttcccctgtacccgaggtggaggccagccaggatcaccccccagcggcgcgcgccaagactgccgagctttccgcgctggccaaggcccgtctcaggaacgcagcaggcgggacggctttttcgctgcgagcgaaactgcgccgcgtcgcgcatcaggtcggcaaggatgcggtgcattaccgcaacgtccagcatcgcctcaacgcccagatgaagcaattgcgtcccgagaccggattccaggatcagctgcatttctccgatgcgtcgcttgcggaagttgaaagcatcctccggcacattgccgtcagcccggcgctcctcagcgcatcccgcagcaaatcggccgtgacggcgttattcaccaagacgttcctgatgccgctgctggatggcggacagttgcgcctccatgagttccgctccggcggcagggcgcaggaagatgaggaggatccgcaccggcaccgatggaacctgaagaccgagcatctgaaaggggcctacgtccagcaggtccacgaggagacgcacgcggacgctcctggcgcgcggctgtatcagaagcaccagctcgaggccacgcccaaggacaagacggagcgccggttcacgcatctgggcgaggttcacgtgcggcagtcggcgaccaagctgtatagcgaggagcagaggccgcacgactttccgctcgcggagacgcacagcgtggccgacctgagccggcatgccggcatgacactgacgctggcgcgtaccggcaaggcgatctatgcggactcgatcgcgtacaacgctggcacggagatcctgacgaccgctccgctgggtcgcgcgccggacgagcaggcgtttatcgagcgcctgcaccgcagcattgcgatcctccagctcgtgcagttgcagcgcgagctggaagcgtacctgcgggggaaggccccggcatcgctgacggctggcgagcagcgccacctggaggacgccaaggcgccgaactacttcgagacatcgctgctgccggctctggcgacgctcgatctcgcgacggcagccggtcaggccagcgacgagttctcgcccgaaacggtggcctacctggacagcgcactcgatcgcatcagatcgacatcgctgcgccagatcattgctgacaacgacgcacatctgcaggccggacacttctgcgccgaattgagcaactttgagcagctgaagtccttgatccggacgaccgagtga

SEQ ID NO: 1325 - DNA, 1314 bp, Xanthomonas oryzae
  source 1..1314: mol_type = genomic DNA
atgcgcacgaattttcttccgcgcagctattatcgcggcgctgcagaacaagccagctcagctgctgccgatgtgccagcagccactccggagtcatgttcatcccacgtgctgcatcaagctcccaggactgatgcggtgaacaatacctccaggtcgccccgcgcaatgctcgcgtcagcgcgcaagtcgctagctagcctgcgcaagcgactgcctatgatgtgcctgggttcaccgaccaccgaagcaacccagaccccgggtaaggcatccacaccccacgcctccgtgcagagtccgccgcgaccgcagatggcgcaagccggcctcgacgcgccagcgccggatgccatgggcaaacccttctacctgaatccgctgcgccccccaccacggcatcaggcaccggtggcgcctgcacgtactagagagcccgtgcaggtgcggccaagccgcaacgaagacagatggcaacagcaacaatctccccatcgacgcaatgcaaccacccaggcgccgcggcaaatggaacctacccgcgctgcagggcgcgtgccggttcgcgaatacgaacaaaacggcagcagtcactggcgacagcaggcgccggaccgcatcgtgactgaccgagtgaggcagccgcgcctcccagagtcgcccccattgccggcgtcactaagcgtgtcgccgacgtcgtcctcgccgactcaaggcaagcggcagacgctattgggcaggctgaatgcgcaattggtcccgtataaccagaggaaatatcagatcgatacccgtgaagaccctacgcctacagaagaggagcgggagttactcagaacgcgtcaggtactcatcgaccaacgcaatgaaatccgtgacattcagctcgacagtatgctcacagggcttgcccctatggaaaatatccacccgccgaagacaacgaccagtcgtgtgagtgttgtccaacacaaggtgattgagaccaataggcgcgcattcttggctgtcgaaggcaaagaactcgacatgggcttgatcggcagggattacgcaagggcgcagcgtcgcattgagccgctggaggccagcggggccgattacaggaagatcaaacgtctgaaacgcatgatggagggttaccaaaactggctggcgttgcggcagatgatcgatgacatcaatgatcagctcgcactgctgggcgcaccacagctgagcgacagcgaccctagtacaccgcgagagcgggaggatgctgctcaggagcagctagacaggcacggagactcaatggagaacggttaccgataa

SEQ ID NO: 1326 - DNA, 2898 bp, Xanthomonas oryzae
  source 1..2898: mol_type = genomic DNA
gcatgcatcgcgcaatgcactgacgggtgcccccctgaacctgaccccggcacaggtggtggccatcgccagcaataacggtggcaagcaggcgctggagacggtgcagcggctgttgccggtgctgtgccaggcccatggcctgaccccggcgcaggtggtggccatcgccagccacgatggcggcaagcaggcactggagacgatgcagcggctgttgccggtgctgtgccaggcccatggcctgaccccggaccaggtggtggccatcgccagcaatattggcggcaagcaggcgctggagacggtgcagcggctgttgccggtgctctgccaggcccatggcctgaccccggaccaggtggtggccatcgccagccatggcggcggcaagcaggcgctggagacggtgcagcggctgttgccggtgctctgccaggcccatggcctgaccccggaccaggtggtggccatcgccagccacgatggcggcaagcaggcgctggagacggtgcagcggctgttgccggtgctgtgccaggcccatggcctgaccccggaccaggtggtggccatcgccagcaatggcggcggcaagcaggcgctggagacggtgcagcggctgttgccggtgctgtgccaggcccatggtctgaccccggaccaggtggtggccatcgccagcaatggcggcaagcaggcgctggagacggtgcagcggctgttgccggtgctgtgccaggcccatggcctgaccccggaccaggtggtggccatcgccagccacgatggcggcaagcaggcgctggagacggtgcagcggctgttgccggtgctgtgccagacccatggtctgaccccggcgcaggtggtggccatcgccagccacgatggcggcaagcaggcgctggagacggtgcagcagctgttgccggtgctgtgccaggcccatggcctgaccccggaccaggtggtggccatcgccagcaatattggcggcaagcaggcgctagcgacggtgcagcggctgttgccggtgctgtgccaagcccatggcctgaccccggaccaggtggtggccatcgccagcaatggcggcggcaagcaggcgctggagacggtgcagcggctgttgccggtgctgtgccaggcccatggcctgaccccggaccaggtggtggccatcgccagcaatggcggcggcaagcaggcgctggagacggtgcagcggctgttgccggtgctgtgccaggcccatggtctgacccaggtgcaggtggtggccatcgccagcaatattggcggcaagcaggcgctggagacggtgcagcggctgttgccggtgctgtgccaggcccatggcctgaccccggcgcaggtggtggccatcgccagccacgatggcggcaagcaggcgctggagacggtgcagcggctgttgccggtgctgtgccaggcccatggcctgaccccggaccaagtggtggccatcgccagcaatggcggcggcaagcaggcgctggagacggtgcagcggctgttgccggtgctgtgccaggcccatggcctgacccaggagcaggtggtggccatcgccagcaataacggcggcaagcaggcgctggagacggtgcagcggctgttgccggtgctgtgccaggcccatggcctgaccccggaccaggtggtggccatcgccagcaatggcggcggcaagcaggcgctggagacggtgcagcggctgttgccggtgctgtgccaggcccatggtctgaccccggcgcaggtggtggccatcgccagcaatattggcggcaagcaggcgctggagacggtgcagcggctgttgccggtgctgtgccaggaccatggcctgaccctggcgcaggtggtggccatcgccagcaatattggcggcaagcaggcgctggagacggtgcagcggctgttgccggtgctgtgccaggcacatggcctgacccaggaccaggtggtggccatcgccagcaatattggcggcaagcaggcgctggagacggtgcagcggctgttgccggtgctgtgccaggaccatggcctgaccccggaccaggtcgtggccatcgccagcaatattggcggcaagcaggcgctggagacggtgcagcggctgttgccggtgctgtgccaggaccatggcctgaccctggaccaggtggtggccatcgccagcaatggcggcaagcaggcgctggagacggtgcagcggctgttgccggtgctgtgccaggaccatggactgaccccggaccaggtcgtggccatcgccagcaatagtggcggcaagcaggcgctggagacggtgcagcggctgttgccggtgctgtgccaggaccatggcctgaccccgaaccaggtggtggccatcgccagcaatggcggcaagcaggcgctggagagcattgttgcccagttatctcgccctgatccggcgttggccgcgttgaccaacgaccacctcgtcgccttggcctgcctcggcggacgtcctgccctggatgcagtgaaaaagggattgccgcacgcgccggaattgatcagaagaatcaatcgccgtattcccgaacgcacgtcccatcgcgttcccgacctcgcgcacgtggtgcgcgtgcttggttttttccagagccactcccacccagcgcaagcattcgatgacgccatgacgcagttcgggatgagcaggcacggcttggtacagctctttcgcagagtgggcgtcaccgaattcgaagcccgctacggaacgctccccccagcctcgcagcgttgggaccgtatcctccaggcatcagggatgaaaagggccaaaccgtcccctacttcagctcaaacaccggatcaggcgtctttgcatgc

SEQ ID NO: 1327 - DNA, 2703 bp, Xanthomonas oryzae
  source 1..2703: mol_type = genomic DNA
gcatgcatggcgcaatgcactgacgggtgcccccctgaacctgaccccggaccaagtggtggccatcgccagcaatattggcggcaagcaggcgctggagacggtgcagcggctgttaccggtgctgtgccaggcccatggcctgaccccggaccaggtcgtggccatcgccagccatggcggcggcaagcaggcgctggagacggtgcaacggctgttgccggtgctgtgccaggaccatggcctgaccccggcccaggtcgtggccatcgccagcaatattggcggcaagcaggcgctggagacggtgcagcggctgttgccggtgctgtgccaggaccatggcctgaccccggaccaggtgatggccatcgccaacaataacggcggcaagcaggcgctggagacggtgcagcggctgttgccggtgctgtgccaggaccatggcctgaccccggaccaggtgatggccatcgccaacaataacggcggcaagcaggcgctggagacggtgcagcggctgttgccggtgctgtgccaggaccatggcctgaccccggaccaggtcgtggccatcgccagcaatattggcggcaagcaggcgctggagacggtgcagcggctgttgccggtgctgtgccaggaccatggcctgaccccgacccaagtgatggccatcgccaacaataacggcggcaagcaggcactggagacggtgcagcggctgttgccggtgctgtgccaggaccatggcctgaccccggaccaggtcgtggccatcgccagccacgatggcggcaagcaggcgctggagacggtgcagcggctgttgccggtgctgtgccaggaccatggcctgaccccggcccaggtcgtggccatcgccagcaatattggcggcaagcaggcgctggagacggtgcagcggctgttgccggtgctgtgccaggaccatggcctgaccccggaccaggtcgtggccatcgccagccacgatggcggcaagcaggcgctggagacggtgcagcggctgttgccggtgctgtgccaggaccatggcctgaccccggaccaggtggtggccatcgccagcaatagtggcggcaagcaggcgctggagacggtgcagcggctgttgccggtgctgtgccaggaccatggcctgaccccggaccaggtggtggccatcgccagcaatagtggcggcaagcaggcgctggagacggtgcagcggctgttgccggtgctgtgccaggaccatggcctgaccccggcccaggtggtggccatcgccagcaatagtggcggcaagcaggcgctggagacggtgcagcggctgttgccggtgctgtgccaggaccatggcctgaccccggaccaagtcgtggccatcgccagccacgatggcggcaagcaggcgctggagacggtgcagcggctgttgccggtgctgtgccaggaccatggcctgaccccggaccaggtcgtggccatcgccaacaataacggcggcaagcaggcgctggagacgctgcagcggctgttgccggtgctgtgccaggaccatggcctgaccccggaccaagtggtggccatcgccagccacgatggcggcaagcaggcgctggagacggtgcagcggctgttgccggtgctgtgccaggaccatggcctgaccccggaccaggtcgtggccatcgccagcaatggcggcggcaagcaggcgctggagacggtgcaacggctgttgccggtgctgtgccaggaccatggcctgaccccggaccaggtcgtggccatcgccagccacgatggcggcaagcaggcgctggagacggtgcagcggctgttgccggtgctgtgccaggaccatggcctgaccccggcccaagtggtggccatcgccagccacgatggcggcaagcaggcgctggagacggtgcagcggctgttgccggtgttgtgccaggaccatggcctgaccccggaccaggtggtggccatcgccagccacgatggcggcaagcaggcgctggagacggtgcagcggctgttgccggtgctgtgccaggaccatggcctgaccccggaccaggtggtggccatcgccagcaatggcggcggcaagcaggcgctgaagacggtgcagcggctgttgccggtgctgtgccaggaccatggcctgaccccggaccaagtggtggccatcgccagcaatggcggcggcaagcaggcgctggagagcattgttgcccagttatcttgccctgatccggcgttggccgcgttgaccaacgaccacctcgtcgccttggcctgcctcggcgggcgtcctgccctggatgcagtgaaaaagggattgccgcacgcgccagaattgatcagaagaatcaatcgccgcattcccgaacgcacgtcccatcgcgttgccgacctcgcgcacgtggttcgcgtgcttggttttttccagagccactcccacccagcgcaagcattcgatgacgccatgacgcagttcgggatgagcaggcacgggttggtacagctctttcgcagagtgggcgtcaccgaattcgaagcccgctacggaacgctccccccagcctcgcagcgttgggaccgtatcctccaggcatcagggatgaaaagggccaaaccgtcccctacttcagctcaaacgccggatcaggcgtctttgcatgc

SEQ ID NO: 1328 - DNA, 4479 bp, Xanthomonas oryzae
  source 1..4479: mol_type = genomic DNA
ggatcccattcgttcgcgcacgccaagtcctgcccgcgagcttctgcccggaccccaaccggatagggttcagccgactgcagatcgggggggggctccgcctgctggcggccccctggatggcttgcccgctcggcggacgatgtcccggacccggctgccatctccccctgcgccctcgcctgcgttctcggcgggcagcttcagcgatctgctccgtcagttcgatccgtcgcttcttgatacatcgcttcttgattcgatgcctgccgtcggcacgccgcatacagcggctgccccagcagagtgggatgaggtgcaatcgggtctgcgtgcagccgatgacccgccacccaccgtgcgtgtcgctgtcactgccgcgcggccgccgcgcgccaagccggccccgcgacggcgtgcggcacaaccctccgacgcttcgccggccgcgcaggtggatctacgcacgctcggctacagtcagcagcagcaagagaagatcaaaccgaaggtgcgttcgacagtggcgcagcaccacgaggcactggtgggccatgggtttacacacgcgcacatcgttgcgctcagccaacacccggcagcgttagggaccgtcgctgtcaagtatcagcacataatcacggcgttgccagaggcgacacacgaagacatcgttggcgtcggcaaacagtggtccggcgcacgcgccctggaggccttgctcacgaaggcgggggagttgagaggtccgccgttacagttggacacaggccaacttctcaagattgcaaaacgtggcggcttgacctcagtgcaggcagtgcatgcatggcgcaatgcactgacgggtgcccccctgaacctgaccccggaccaagtggtggccatcgccagcaatattggcggcaagcaggcgctggagacggtacagcggctgttgccggtgctgtgccaggccaatggcctgaccccggaccaggtcgtggccatcgccagccatggcggcggcaagcaggcgctggagacggtgcagcgcctgttgccggtgctgtgccaggaccatggcctgaccccggaccaggtcgtggccatcgccagcaatattggcggcaagcaggcgctggagacggtgcagcggctgttgccggtgctgtgccaggaccatggcctgaccccggaccaggtcgtggccatcgccagccatggcggcggcaagcaggcgctggagacggtgcagcggctgttgccggtgctgtgccaggaccatggcctgaccccggaccaggtggtggccatcgccagcaatattggcggcaagcaggcgctagagacggtgcagcggctgttgccggtgctgtgccaggcccatggcctgaccccggaccaggtggtggccatcgccagcaatattggcggcaagcaggcgctggagacggtgcagcggctgttgccggtgctgtgccaggaccatggcctgaccccggcccaggtggtggccatcgccagcaatattggcggcaagcaggcgctggagacggtgcagcggctgttgccggtgctgtgccaggaccatggcctgaccccggaccaagtcgtggccatcgccagccacgatggcggcaagcaggcgctggagacggtgcagcggctgttgccggtgctgtgccaggaccatggcctgaccccggaccaggtggtggccatcgccaacaataacggcggcaagcaggcgctggagacggtgcagcggctgttgccggtgctgtgccaggaccatggcctgaccccggaccaagtcgtggccatcgccagccacgatggcggcaagcaggcgctggagacggtgcagcggctgttgccggtgctgtgccaggaccatggcctgaccccggaccaggtcgtggccatcgccagccacgatggcggcaagcaggcgctggagacggtgcagcggctgttgccggtgctgtgccaggaccatggcctgaccccggcccaagtggtggccatcgccagccacgatggcggcaagcaggcgctggagacggtgcagcggctgttgccggtgctgtgccaggaccatggcctgaccccggaccaggtggtggccatcgccagcaatggcggcggcaagcaggcgctggcgacggtgcagcggctgttgccggtgctgtgccaggcccatggcctgaccccggaccaggtcgtggccatcgccagccacgatggcggcaagcaggcgctggagacggtgcagcggctgttgccggtgctgtgccaggccaatggcctgaccccggaccaggtcgtggccatcgccagcaatggcggcaagcaggcgctggagacggtgcagcggctgttgcctgtacagcggctgttgccggtgctgtgccaggaccatggcctgacccaggaccaggtggtggccatcgccagcaatattggcggcaagcaggcgctggagacggtgcagcggctgttgccggtgctgtgccaggccaatggcctgacccaggaccaggtggtggccatcgccagccacgatggcggcaagcaggcgctggagacggtgcagcggctgttgccggtgctgtgccaggaccatggcctgaccccggaccaggtcgtggccatcgccagccacgatggcggcaaacaggcgctggagacggtgcagcggctgttgccggtgctgtgccaggaccatggcctgaccccggcccaggtggtggccatcgccaacaataacggcggcaagcaggcgctggagacggtgcagcggctgttgccggtgctgtgccaggaccatggcctgaccccggaccaagtggtggccatcgccagcaatagtggcggcaagcaggcgctggagacggtgcagcggctgttgccggtgctgtgccaggaccatggcctgaccccggaccaggtcgtggccatcgccagcaatattggcggcaagcaggcgctggcgacggtgcagcggctgttgccggtgctgtgccaggaccatggcctgaccccggaccaggtcgtggccatcgccaacaataacggcggcaagcaggcgctggagacggtgcagcggctgttgccggtgctgtgccaggaccatggcctgaccccggcgcaggtggtggccatcgccagcaataacggcggcaagcaggcgctggagacggtgcagcggctgttgccggtgctgtgccaggaccatggcctgaccctggaccaggtggtggccattgccagcaatggcggcagcaaacaggcgctggagacggtgcagcggctgttgccggtgctgtgccaggaccatggcctgaccccggaccaagtggtggccatcgccaacaataacggcggcaagcaggcgctggagacggtgcagcggctgttgccggtgctgtgccaggaccatggcctgaccctggaccaggtggtggccatcgccagccacgatggcggcaagcaggcgctggagacggtgcagcggctgttgccggtgctgtgccaggaccatggcctgaccctggacaaggtggtggccatcgccagcaatggcggcaagcaggcgctggagacggtgcagcggctgttgccggtgctgtgccaggaccatggcctgaccccgaaccaggtggtggccatcgccagcaatagtggcggcaagcaggcgctggagacggtgcagcggctgttgccggtgctgtgccaggaccatggcctgaccccgaaccaggtggtggccatcgccagcaatggcggcaagcaggcgctggagagcattgttgcccagttatctcgccctgatccggcgttggccgcgttgaccaacgaccacctcgtcgccttggcctgcctcggcggacgtcctgccctggatgcagtgaaaaagggattgccgcacgcgccggaattgatcagaagaatcaatcgccgcattcccgaacgcacgtcccatcgcgttcccgacctcgcgcacgtggttcgcgtgcttggttttttccagagccactcccacccagcgcaagcattcgatgacgccatgacgcagttcgagatgagcaggcacggcttggtacagctctttcgcagagtgggcgtcaccgaattcgaagcccgctacggaacgctccccccagcctcgcagcgttgggaccgtatcctccaggcatcagggatgaaaagggccaaaccgtcccctacttcagctcaaacaccggatcaggcgtctttgcatgcattcgccgattcgctggagcgtgaccttgatgcgcctagcccaatgcacgagggagatcagacaggggcaagcagccgtaaacggtcccgatcggatcgtgctgtcaccggcccctccgcacagcaatctttcgaggtgcgcgttcccgaacagcgcgatgcgctgcatttgcccctcagctggagggtaaaacgcccgcgtaccaggatcgggggcggcctcccggatcc

SEQ ID NO: 1329 - DNA, 3117 bp, Xanthomonas oryzae
  source 1..3117: mol_type = genomic DNA
gcatgcatggcgcaatgcactgacgggtgcccccctgaacctgaccccggaccaagtggtggccatcgccagcaatattggcggcaagcaggcgctggagacggtacagcggctgttgccggtgctgtgccaggaccatggcctgaccccggaccaggtcgtggccatcgccagccatggcggcggcaagcaggcgctggagacggtgcagcggctgttgccggtgctgtgccaggaccatggcctgaccccggaccaggtggtggccatcgccagcaatattggcggcaagcaggcgctagagacggtgcagcggctgttgccggtgctgtgccaggcccatggcctgaccccggaccaggtcgtggccatcgccagcaatattggcggcaagcaggcgctggagacggtgcagcggctgttgccggtgctgtgccaggaccatggcctgaccccggcccaggtggtggccatcgccagcaatagtggcggcaagcaggcgctggagacggtgcagcggctgttgccggtgctgtgccaggaccatggcctgaccccggaccaagtcgtggccatcgccagccacgatggcggcaagcaggcgctggagacggtgcagcggctgttgccggtgctgtgccaggaccatggcctgaccccggaccaggtcgtggccatcgccaacaataacggcggcaagcaggcgctggagacgctgcagcggctgttgccggtgctgtgccaggaccatggcctaaccccggaccaagtggtggccatcgccagccacgatggcggcaagcaggcgctggagacggtgcagcggctgttgccggtgctgtgccaggaccatggcctgaccccggaccaggtggtggccatcgccagccacgatggcggcaagcaggcgctggagacggtgcagcggctgttgccggtgctgtgccaggaccatggcctgaccccggcccaagtggtggccatcgccagccacgatggcggcaagcaggcgctggagacggtgcagcggctgttgccggtgctgtgccaggaccatggcctgaccccggaccaggtggtggccatcgccagcaatagcggcggcaagcaggcgctggagacggtacagcggctgttgccggtgctgtgccaggaccatggactgaccccggaccaggtcgtggccatcgccagcaatggcggcaagcaggcgctggagacggtacagcggctgttgccggtgctgtgccaggaccatggcctgaccccggaccaggtcgtggccatcgccagcaatggcggcaagcaggcgctggagacggtgcagcggctgttgccggtgcagcggctgttgccggtgctgtgccaggaccatggcctgacccaggaccaggtggtggccatcgccagccacgatggcggcaagcaggcgctggagacggtgcagcggctgttgccggtgctgtgccaggaccatggcctgaccccggaccaagtggtggccatcgccagccacgatggcggcaaacaggcgctggagacggtgcagcggctgttgccggtgctgtgccaggaccatggcctgaccccggaccaagtggtggccatcgccagcaatagtggcggcaagcaggcgctggagacggtgcagcggctgttgccggtgctgtgccaggaccatggcctgaccccggaccaggtggtggccatcgccagcaataatggcggcaagcaggcgctggagacggtgcagcggctgttgccggtgctgttccaagaacatggcctgaccccggaccaagtggtggccatcgccagcaatagtggcggcaagcaggcgctggagacggtgcagcggctgttgccggtgctgtgccaggaccatggcctgaccccggaccaggtcgtggccatcgccaacaataacggcggcaagcaggcgctggagacggtgcagcggctgttgccggtgctgtgccaggaccatggcctgaccccggcgcaggtggtggccatcgccagcaatattggcggcaagcaggcgctggagacagtgcagcggctgttgccggtgctgtgccaggaccatggcctgaccttggaccaggtggtggccattgccagcaatggcggcagcaaacaggcgctagagacggtgcagcggctgttgccggtgctgtgccaggaccatggcctgaccccggaccaagtggtggccatcgccaacaataacggcggcaagcaggcgctggagacggtgcagcggctgttgccggtgctgtgccaggaccatggcctgaccccggaccaggtcgtggccatcgccagcaatattggcggcaagcaggcgctggagacggtgcagcggctgttgccggtgctgtgccaggaccatggcctgaccctggaccaggtggtggccatcgccagcaatggcggcaagcaggcgctggagacggtgcagcggctgttgccggtgctgtgccaggaccatggcctgaccccgaaccaggtggtggccatcgccagcaatagtggcggcaagcaggcgctggagacggtgcagcggctgttgccggtgctgtgccaggaccatggcctgaccccgaaccaggtggtggccatcgccagcaatggcggcaagcaggcgctggagagcattgttgcccagttatctcgccctgatccggcgttggccgcgttgaccaacgaccaccttgttgccttggcctgcctcggcggaagtcctgccctggatgcagtgaaaaagggattgccgcacgcgccggaattgatcagaagaatcaatcgccgcattcccgaacgcacgtcccatcgcgttcccgacctcgcgcacgtggttcgcgtgcttggttttttccagagccactcccacccagcgcaagcattcgatgacgccatgaagcagttcgagatgagcaggcacggcttggtacagctttttcgcagagtgggcgtcaccgaattcgaagcccgctacggaacgctccccccagcctcgcagcgttgggaccgtatcctccaggcatcagggatgaaaagggccaaaccgtcccctacttcagctcaaacaccggatcaggcgtctttgcatgc

SEQ ID NO: 1330 - DNA, 3825 bp, Xanthomonas oryzae
  source 1..3825: mol_type = genomic DNA
atggatcccattcgtccgcgcgcgccaagtcctgcccgcgaggttctgcccggcccccaaccggatagggttcagccgactgcagatcgtggggtgtctgcgcctgctggcagccctctggatggcttgcccgctcggcggacgatgtcccggacccggctgccatctccccctgcccccttgcctgcgttctcggcgggcagcttcagcgatctgctccgtcagttcgatccgtcgcttcttgatacatcgctttttgattcgatgcctgccgtcggcacgcctcatacagaggctgccccagcagagggggatgaggtgcaatcggctctgcgtgcagccgatgacccgccacccaccgtgcgtgtcgctgtcactgccgcgcaggtggatctacgcacgctcggctacagtcagcagcaagagaagatcaaaccgaatgttcgttcgacagtggcgcagcaccacgaggcactggtgggccatgggtttacacacgcgcacatcgttgcgctcagccgacacccggcagcgttagggaccgtcgctgtcaagtatcaggacatgatcgcggcgttaccagaggcgacacacgaagacatcgttggggtcggcaaacagtgttccggcgcacgcgccctggaggccttgctcacggtggcgggagagttgagaggtccaccgttacagttggacacaggccaacttgtcaagattgcaaaacgtggcggcgtgaccgcagtggaggcagtgcatgcatcgcgcaatgcactgacgggtgcccccctgaacctgaccccggcacaggtggtggccatcgccagcaatagcggcggcaagcaggcgctggagacggtgcagcggctgttgccggtgctgtgccaggcccatggcctgaccccggagcaggtggtggccatcgccagcaatggcggcggcaagcaggcgctggagacggtgcagcggctgttgccggtgctgtgccaggcccatggcctgaccccggcgcaggtggtggccatcgccagcaatagcggcggcaagcaggcgctggagacggtgcagcggctgttgccggtgctgtgccaggcccatggcctgaccccggaccaggtggtggccatcgccagccacgatggcggcaagcaggcgctggagacggtgcagcgactgttgccggtgctgtgccaggcccatggcctgaccccggagcaggtggtggccatcgccagcaatattggcggcaagcaggcgctggagacggtgcagcggctgttgccggtgctgtgccaggcccatggcctgaccccggagcaggtggtggccatcgccagcaatggcggcggcaagcaggcgctggagacggtgcagcggttgttgccgatgctgtgccaggcccatggcctgaccccggagcaggtggtggccatcgccagcaataacggcggcaagcaggcgctggagacggtgcagcggctgttgccggtgctgtgccaggcccatggcctgaccccggagcaggtggtggccatcgccagcaatggcggcggcaagcaggcgctggagacggtgcagcggctgttgccggtgctgtgccaggcccatggcctgaccccggaccaagtggtggccatcgccagccacgatggcggcaagcaggcgctggagacggtgcagcggctgttgccggtgctgtgccaggcccatggcctgaccccggcgcaggtggtggccatcgccagcaatattggcggcaagcaggcgctggagacggtgcggcggctgttgccggtgctgtgccaggcccatggcctgaccccggcgcaggtggtggccatcgccaacaataacggcggcaagcaggcgctggagacggtgcagcggctgttgccggtgctgtgccaggcccatggcctgaccccggagcaggtggtggccatcgccagcaatggcggcaagcaggcgctggagacggtgcagcggctgttgccggtgctgtgccaggcccatggcctgaccccggagcaggtggtggccatcgccagcaatattggcggcaagcaggcgctggagacggtgcagcggctgttgccggtgctgtgccaggcccatggcctgaccccggagcaggtggtggccatcgccagcaataacggcggcaagcaggccctggagacggtgcagcggctgttgccggtgctgtgccaggcccatggcctgaccccggaccaggtggtggccatcgccagccacgatggcggcaagcaggcgctggagacggtgcagcggctgttgccggtgctgtgccaggcccatggcctgaccctggagcaggtggtggccatcgccagcaatggcggcggcaagcaggcgctggagacggtgcagcggctgttgccggtgctgtgccaggcccatggcctgaccccggcgcaggtggtggccatcgcctgcaatattggcggcaagcaggcgctggagacggtgcggcggctgttgccggtgctgtgccaggcccatggcctgaccccggcgcaggtggtggccatcgccaacaataacggcggcaagcaggcgctggagacggtgcagcggctgttgccggtgctgtgccaggcccatggcctgaccccggcgcaggtggtggccatcgccagcaatggcggcaagcaggcgctggagacggtgcagcggctgttgccggtgctgtgccaggcccatggtctgaccccggcgcaggtggtggccatcgccagccacgatggcggcaagcaggcgttggagacggtgcagcggctgttgccggtgctgtgccaggcccatggcctgaccccggaccaggtggtggccatcgccagcaataacggcggcaagcaggcgctggagacggtgcagcggctgttgccggtgctgtgccaggcccatggcctgaccccggagcaggtggtggccatcgccagcaatggcggcggcaagcaggcgctggagagcattgttgcccagttatctcgccctgatccggcgttggccgcgttgaccaacgaccacctcgtcgccttggcctgcctcggcggacgtcctgccctggatgcagtgaaaaagggattgccgcacgcgccggaattgatcagaagagtcaatagccgtattgccgaacgcacgtccgatcgcgttaccgactacgcgcaagtggttcgcgtgctggagtttttccagtgccactcccacccagcgcacgcatttgatgaggccatgacgcagttcggtatgagcaggaacggattgttacagctctttcgcagagtgggcgtcaccgaactcgaagcctgcggtggaacgctccccccagcctcgcagcgttggcaccgtatcctccaagcatcagggatgaaaagtgccaaaccgtcctgtgcttcggctcaaacgccggatcaggcgtctttgcatgcattcgccgattcgccggagcgtgaccttgatgcgcccagcccaatgcacgagggagatcagacgcgggcaagcagccgtaaacggtcccgatcggatcgtgctgtcaccggcccctccgcacagcaggctgtcgaggtgcgcgttcccgaacagcgcgatgcgctgcatttgcccctcagctggagtgtaaaacgcccgcgtaccaggatcgggggcggcctcccggatcctggtacgcccatggctgccgacctggcagcgtccagcaccctgatgtgggaacaagatgtggaccacttcgcaggggcagcggatgatttcccggcattcaacgaagaggaactcgcatggttgagggagctattgcctcagtga

SEQ ID NO: 1331 - DNA, 3315 bp, Xanthomonas oryzae
  source 1..3315: mol_type = genomic DNA
atggatcccattcgttcgcgcacgccaagtcctgcccgcgagcttctgcccggaccccaaccggataggattcagccgactgcagatcgggggggggctccgcctgctggcggccccctggatggcttgcccgctcggcggacgatgtcccggacccggctgccatctccccctgcgccctcgcctgcgttctcggcgggcagcttcagcgatctgctccgtcagttcgatccgtcgcttcttgatacatcgcttcttgattcgatgcctgccgtcggcacgccgcatacagcggctgccccagcagagtgggatgaggtgcaatcgggtctgcgtgcagccgatgacccgccacccaccgtgcgtgtcgctgtcactgccgcgcggccgccgcgcgccaagccggccccgcgacggcgtgcggcgcaaccctccgacgcttcgccggccgcgcaggtggatctacgcacgctcggctacagtcagcagcagcaagagaagatcaaaccgaaggtgcgttcgacagtggcgcagcaccacgaggcactggtgggccatgggtttacacacgcgcacatcgttgcgctcagccaacacccggcagcgttagggaccgtcgctgtcaagtatcagcacataatcacggcgttgccagaggcgacacacgaagacatcgttggcgtcggcaaacagtggtccggcgcacgcgccctggaggccttgctcacgaaggcgggggagttgagaggtccgccgttacagttggacacaggccaacttctcaagattgcaaaacgtggcggcgtgaccgcagtggaggcagtgcatgcatggcgcaatgcactgacgggtgcccccctgaacctgaccccggaccaagtggtggccatcgccagcaatattggcggcaagcaggcgctggagacggtgcagcggctgttgccggtgctgtgccaggcccatggcctgaccccggaccaggtggtggccatcgccaacaataacggcggcaagcaggcactggagacggtgcagcggctgttgccggtgctgtgccaggcccatggcctgaccccggcgcaggtggtggccatcgccagcaataacggcggcaagcaggcgctggagacggtgcagcggctgttgccggtgctgtgccaggaccatggcctgaccccggaccaagtggtggccatcgccagcaatattggcggcaagcaggcgctggagacggtgcaacggctgttgccggtgctgtgccaggaccatggcctgaccccggaccaggtcgtggccatcgccagcaatattggcggcaagcaggcgctggagacggtgcagcggctgttgccggtgctgtgccagacccatgccctgaccccggaccaggtggtggccatcgccagcaatattggcggcaagcaggcgctggagacggtgcagcggctgttgccggtgctgtgccaggaccatggcctgaccccggcgcaggtggtggccatcgccagccacgatggcggcaagcaggcgctggagacggtgcagcggctgttgccggtgctgtgccaggaccatggcctgaccccggaccaggtggtggccatcgccagcaatagtggcggcaagcaggcgctggagacggtgcagcggctgttgccggtgctgtgccaggcccatggcctgaccctggaccaggtggtggccatcgccagccatggcggcggcaagcaggcgctggagacggtgcagcggctgttgccggtgctgtgccaggaccatggcctgaccccggaccaggtggtggccatcgccagcaataacggcggcaagcaggcgctggagacggtgcagcggctgttgccggtgctgtgccaggaccatggcctgatcccggaccaggtggtggccatcgccaacaataacggcggcaagcaggcgctggagacggtgcagcggctgttgccggtgctgtgccaggcccatggcctgaccacggaccaggtggtgaccatcgccagcaataacggcggcaagcaggcgctggagacggtgcaacggctgttgccggtgctgtgccaggaccatggcctgaccccggaccaggtcgtggccatcgccagcaatattggcggcaagcaggcgctggagacggtgcagcggctgttgccggtgctgtgccaggaccatggcctgaccctggaccaggtggtggccatcgccagcaatattggcggcaagcaggcgctggagacggtgcagcggctgttgccggtgctgtgccaggaccatggcctgaccccggaccaggtcgtggccatcgccagccatggcggcggcaagcaggcgctggagacggtgcagcggctgttgccggtgctgtgccaggaccatggcctgaccccggaccaggtggtggccatcgccagccacgatggtggcaagcaggcgctggagagcattgttgcccagttatctcgccctgatccggcgttggccgcgttgaccaacgaccacctcgtcgccttggcctgcctcggcggacgtcctgccctggatgcagtgaaaaagggattgccgcacgcgccggaattgatcagaagaatcaatcgccgtattcccgaacgcacgtcccatcgcgttgccgactacgcgcaagtggttcgcgtgctggagtttttccagtgccactcccacccagcgtacgcatttgatgaggccatgacgcagttcgggatgagcaggaacgggttggtacagctctttcgcagagtgggcgtcaccgaactcgaagcccgcggtggaacgctccccccagcctcgcagcgttgggaccgtatcctccaggcatcagggatgaaaagggccaaaccgtcccctacttcagctcaaacaccggatcaggcgtctttgcatgcattcgccgattcgctggagcgtgaccttgatgcgcctagcccaatgcacgagggagatcagacaggggcaagcagccgtaaacggtcccgatcggatcgtgctgtcaccggcccctccgcacagcaatctttcgaggtgcgcgttcccgaacagcacgatgcgctgcatttgcccctcagctggagggtaaaacgcccgcgtaccaggatcgggggcggcctcccggatcctggtacgcccatcgctgccgacctggcagcgtccagcaccgtgatgtgggaacaagatgcggcccccttcgcaggggcagcggatgatttcccggcattcaacgaagaggaactcgcatggttgatggagctattgcctcagtcaggctcagtcggagggacgatctga

SEQ ID NO: 1332 - DNA, 3519 bp, Xanthomonas oryzae
  source 1..3519: mol_type = genomic DNA
atggatcccattcgttcgcgcacgccaagtcctgcccgcgagcttctgcccggaccccaaccggatagggttcagccgactgcagatcgggggggggctccgcctgctggcggccccctggatggcttgcccgctcggcggacgatgtcccggacccggctgccatctccccctgcgccctcgcctgcgttctcggcgggcagcttcagcgatctgctccgtcagttcgatccgtcgcttcttgatacatcgcttcttgattcgatgcctgccgtcggcacgccgcatacagcggctgccccagcagagtgcgatgaggtgcaatcgggtctgcgtgcagccgatgacccgccacccaccgtgcgtgtcgctgtcactgccgcgcggccgccgcgcgccaagccggccccgcgacggcgtgcggcgcaaccctccgacgcttcgccggccgcgcaggtggatctacgcacgctcggctacagtcagcagcagcaagagaagatcaaaccgaaggtgcgttcgacagtggcgcagcaccacgaggcactggtgggccatgggtttacacacgcgcacatcgttgcgctcagccaacacccggcagcgttagggaccgttgctgtcacgtatcaggacataatcagggcgttgccagaggcgacacacgaagacatcgttggcgtcggcaaacagtggtccggcgcacgcgccctggaggccttgctcacggaggcgggggagttgagaggtccgccgttacagttggacacaggccaacttctcaagattgcaaaacgtggcggcgtgaccgcagtggaggcagtgcatgcatggcgcaatgcactgacgggtgcccccctgaacctgaccccggaccaagtggtggccatcgccagcaatattggcggcaaccaggcgctggagacggtgcagcggctgttgccggtgctgtgccaggcccatggcctgaccccggaccaggtcgtggccatcgccagccatggcggcggcaagcaggcgctggagacggtgcagcggctgttgccggtgctgtgccaggaccatggcctgaccccggaccaggtggtggccatcgccagcaatattggcggcaagcaggcgctggagacggtgcaacggctgttgccggtgctgtgccaggaccatggcctgaccccggaccaggtggtggccatcgccagcaatattggcggcaagcaggcgctggagacggtgcagcggctgttgccggtgctgtgccaggaccatggcctgaccccggaccaggtggtggccatcgccagcaatattggcggcaagcaggcgctggagacggtgcagcggctgttgccggtgctgtgccaggaccatggcctgaccccggaccaggtggtggccatcgccaacaataacggcggcaagcaggcgctggagacggtgcaacggctgttgccggtgctgtgccaggaccatggcctgaccccggaccaggtggtggccatcgccagccacgatggcggcaagcaggcgctggagacggtgcagcggctgttgccggtgctgtgccagggccatggcctgaccccggacaaggtggtggccatcgccagcaatagtggcggcaagcaggcgctggagacggtgcagcggctgttgccggtgctgtgccaggaccatggcctgaccccggaccaggtggtggccatcgccaacaataacggcggcaagcaggcgctggagacggtgcagcggctgttgccggtgctgtgccaggaccatggcctgaccccggaccaggtggtggccatcgccagcaatagtggcggcaagcaggcgctggagacggtgcagcggctgttgccggtgctgtgccaggaccatggtctgaccccggcccaggtggtggccatcgccaacaataacggcggcaagcaggcgctggagacggtgcggcggctgttgccggtgctgtgccaggaccatggcctgaccccggaccaggtcgtggccatcgccagccacgatggcggcaagcaggcgctggagacggtgcagcggctgttgccggtactgtgccaggaccatggcctgaccccggaccaggtggtggccatcgccaacaataacggcggcaagcaggcgctggagacggtgcagcggctgttgccggtgctgtgccagaaccatggcctgaccccggaccaggtcgtggccatcgccagcaatattggcggcaagcaggcgctggagacggtgcagcggctgttgccggtgctgtgccaggaccatggcctgaccccggaccaggtggtggccatcgccagccacgatggcggcaagcaggcgctggagacggtgcagcggctgttgccggtgctgtgccaggaccatggcctgaccccggcccaggtggtggccatcgccaacaataacggcggcaagcaggcgctggagacggtgcggcggctgttgccggtgctgtgccaggaccatggcctgagcccggaccaggtcgtggccatcgccagcaatagtggcggcaagcaggcgctggagacggtgcagcggctgttgccggtgctgtgccaggaccatggcctgaccccggcccaggtggtggccatcgccagcaatggcggcggcaagcaggcgctggagagcattgttgcccagttatctcgccctgatccggcgttggccgcgttgaccaacgaccacctcgtcgccttggcctgcctcggcggacgtcctgccctggatgcagtgaaaaagggattgccgcacgcgccggaattgatcagaagaatcaatcgccgtattcccgaacgcacgtcccatcgcgttgccgactacgcgcaagtggttcgcgtgctggagtttttccagtgccactcccacccagcgtacgcatttgatgaggccatgacgcagttcgggatgagcaggaacgggttgttacagctctttcgcagagtgggcgtcaccgaactcgaagcccgcggtggaacgctccccccagcctcgcagcgttgggaccgtatcctccaggcatcagggatgaaaagggccaaaccgtcccctacttcagctcaaacaccggatcaggcgtctttgcatgcattcgccgattcgctggagcgtgaccttgatgcgcctagcccaatgcacgagggagatcagacaggggcaagcagccgtaaacggtcccgatcggatcgtgctgtcaccggcccctccgcacagcaatctttcgaggtgcgcgttcccgaacagcacgatgcgctgcatttgcccctcagctggagggtaaaacgcccgcgtaccaggatcgggggcggcctcccggatcctggtacgcccatcgctgccgacctggcagcgtccagcaccgtgatgtgggaacaagatgcggcccccttcgcaggggcagcggatgatttcccggcattcaacgaagaggagctcgcatggttgatggagctattgcctcagtcaggctcagtcggagggacgatctga

SEQ ID NO: 1333 - DNA, 3774 bp, Xanthomonas oryzae
  source 1..3774: mol_type = genomic DNA
atgtcccggacccggctgccatctccccctgcgccctcgcctgcgttctcggcgggcagcttcagcgatctgctccgtcagttcgatccgtcgcttcttgatacatcgcttcttgattcgatgcctgccgtcggcacgccgcatacagcggctgccccagcagagtgcgatgaggtgcaatcgggtctgcgtgcagccgatgacccgccacccaccgtgcgtgtcgctgtcactgccgcgcggccgccgcgcgccaagccggccccgcgacggcgtgcggcgcaaccctccgacgcttcgccggccgcgcaggtggatctacgcacgctcggctacagtcagcagcagcaagagaagatcaaaccgaaggtgcgttcgacagtggcgcagcaccacgaggcactggtgggccatgggtttacacacgcgcacatcgttgcgctcagccaacacccggcagcgttagggaccgttgctgtcacgtatcaggacataatcagggcgttgccagaggcgacacacgaagacatcgttggcgtcggcaaacagtggtccggcgcacgcgccctggaggccttgctcacggaggcgagggagttgagaggtccgccgttacagttggacacaggccaacttctcaagattgcaaaacgtggcggcgtgaccgcagtggaggcagtgcatgcatggcgcaatgcactgacgggtgcccccctgaacctgaccccggaccaagtggtggccatcgccagcaatattggcggcaagcaggcgctggagacggtgcagcggctgttgccggtgctgtgccaggaccatggcctgaccccggaccaggtcgtggccatcgcccgcaatggcggcggcaagcaggcgctggagacggtgcaacgactgttgccggtgctgtgccaggaccatggcctgaccccggaccaggtcgtggccatcgccagcaatattggcggcaagcaggcgctggagacggtgcagcggctgttgccggtgctgtgccaggaccatggcctgaccccggaccaggtggtggccatcgccagcaatattggcggcaagcaggcgctagcgacggtgcagcggctgttgccggtgctgtgccaggcccatggcctgaccccggaccaggtggtggccatcgccagcaatggcggcaagcaggcgctggagacggtgcagcggctgttgccggtgctgtgccaggaccatggcctgaccccggaccaggtcgtggccattgccagcaataacggcggcaagcaggcgctggagacggtgcagcggctgttgccggtgctgtgccaggaccatggcctgaccccggaccaggtcgtggccatcgccagccacgatggcggcaagcaggcgctggagacggtgcagcggctgttgccggtgctgtgccaggaccatggcctgaccccggaccaggtcgtggccatcgccagccacgatggcggcaagcaggcgctggagacggtgcagcggctgttgccggtgctgtgccaggaccatggcctgaccccggaccaggtggtggccatcgccagcaatggcggcaagcaggcgctggagacggtgcagcggctgttgccggtgctgtgccaggaccatggcctgaccctggcgcaggtggtggccatcgccagcaatattggcggcaagcaggcgctggagacggtgcagcggctgttgccggtgctgtgccaggaccatggcctgaccccggaccaggtcgtggccatcgccagtaatattggcggcaagcaggcgctggagacggtgcagcggctgttgccggtgctgtgccaggaccatggcctgaccccggaccaggtcgtggccatcgccagtaatattggcggcaagcaggcgctggagacggtgcagcggctgttgccggtgctgtgccaggcccatggcctgaccccggaccaggtcgtggccatcgccagcaatggcggcggcaagcaggcgctggagacggtgcagcggctgttgccggtgctgtgccaggaccatggcctgaccccggaccaggtggtggccatcgccagccacgatggcggcaagcaggcgctggagacggtgcagcggctgttgccggtgctgtgccaggaccatggcctgaccccggaccaggtggtggccatcgccagccatggcggcggcaagcaggcgctggagacagtgcagcggctgttgccggtgctgtgccaggaccatggcctgaccccggaccaggtggtggccatcgccaacaataacggcggcaagcaggcgctggagacggtgcagcggctgttgccggtgctgtgccagcaccatggcctgaccccggcccaggtggtggccatcgccagcaatagcggcggcaagcaggcgctggagacggtgcaacggctgttgccggtgctgtgccaggaccatggcctgaccccggaccaagtggtggccatcgccaacaataacggcggcaagcaggcgctggagacggtgcagcggctgttgccggtgctgtgccaggaccatggcctgaccccggaccaggtcgtggccatcgccagccacgatggcggcaagcaggcgctggagacggtgcagcggctgttgccggtgctgtgccaggaccatggcctgaccctggaccaggtcgtggccatcgccagccacgatggcggcaagcaggcgctggagacggtgcagcggctgttgccggtgctgtgccaggaccatggcctgaccccggaccaggtcgtggccatcgccagcaatggcggcggcaagcaggcgctggagacggtgcagcggctgttgccggtgctgtgccaggaccatggcctgaccccggcccaggtggtggccatcgccagcaatggcggcaagcaggcgctggagagcattgttgcccagttatctcgccctgatccggcgttggccgcgttgaccaacgaccacctcgtcgccttggcctgcctcggcggacgtcctgccctggatgcagtgaaaaagggattgccgcacgcgccggaattgatcagaagaatcaatcgccgcattcccgaacgcacgtcccatcgcgttcccgacctcgcgcacgtggtgcgcgtgcttggttttttccagagccactcccacccagcgcaagcattcgatgacgccatgacgcagttcgagatgagcaggcacggcttggtacagctctttcgcagagtgggcgtcaccgaattcgaagcccgctacggaacgctccccccagcctcgcagcgttgggaccgtatcctccaggcatcagggatgaaaagggccaaaccgtcccctacttcagctcaaacaccggatcaggcgtctttgcatgcattcgccgattcgctggagcgtgaccttgatgcgcctagcccaatgcacgagggagatcagacaggggcaagcagccgtaaacggtcccgatcggatcgtgctgtcaccggcccctccgcacagcaatctttcgaggtgcgcgttcccgaacagcgcgatgcgctgcatttgcccctcagctggagggtaaaacgcccgcgtaccaggatcgggggcggcctcccggatcctggtacgcccatcgctgccgacctggcagcgtccagcaccgtgatgtgggaacaagatgcggcccccttcgcaggggcagcggatgatttcccggcattcaacgaagaggagctcgcatggttgatggagctattgcctcagtcaggctcagtcggagggacgatctga

SEQ ID NO: 1334 - DNA, 3714 bp, Xanthomonas oryzae
  source 1..3714: mol_type = genomic DNA
atggatcccattcgttcgcgcacgccaagtcctgcccgcgagcttctgcccggaccccaaccggatagggttcagccgactgcagatcggggggggactccgcctgctggcggccccctggatggcttgcccgttcggcggacgatgtcccggacccggctgccatctccccctgcaccctcgcctgcgttctcggcgggcagcttcagcgatctgctccgtcagttcgatccgtcgcttcttgatacatcgcttcttgattcgatgcctgccgtcggcacgccgcatacagcggctgccccagcagagtgggatgaggtgcaatcgggtctgcgtgcagccgatgacccgccacccactgtgcgtgtcgctgtcactgccgcgcggccgccgcgcgccaagccggccccgcgacggcgtgcggcgcaaccctccgacgcttcgccggccgcgcaggtggatctacgcacgctcggctacagtcagcagcagcaagagaagatcaaaccgaaggtgcgttcgacagtggcgcagcaccacgaggcactggtgggccatgggtttacacacgcgcacatcgttgcgctcagccaacacccggcagcgttagggaccgttgctgtcacgtatcaggacataatcagggcgttgccagaggcgacacacgaagacatcgttggcgtcggcaaacagtggtccggcgcacgcgccctggaggccttgctcacggaggcgagggagttgagaggtccgccgttacagttggacacaggccaacttctcaagattgcaaaacgtggcggcgtgaccgcagtggaggcagtgcatgcatggcgcaatgcactgacgggtgcccccctgaacctgaccccggaccaagtggtggccatcgccagcaatattggcggcaaccaggcgctggagacggtacagcggctgttgccggtgctgtgccaggcccatggcctgaccccggaccaggtcgtggccatcgccagcaatggcggcaagcaggcgctggagacggtgcagcggctgttgccggtgctgtgccaggaccatagcctgaccccggaccaggtcgtggccatcgccagcaatataggcggcaagcaggcgctggagacggtgcagcggctgttgccggtgctgtgccaggaccatggcctgaccccggaccaggtggtggccatcgccagcaatagtggcggcaagcaggcgctggagacggtgcagcggctgttgccggtgctgtgccaggaccatggcctgaccccggaccaggtgatggccatcgccagcaataacggcggcaagcaggcgctggagacggtgcaacggctgttgccggtgctgtgccaggaccatggcctgaccccggaccaggtggtggccatcgccagcaatggcggcggcaagcaggcgctggagacggtgcagcggctgttgccggtgctgtgccaggcccatggcctgaccccggaccaagtggtggccatcgccaacaataacggcggcaagcaggcgctggagacggtgcaacggctgttgccggtgctgtgccaggcccatggcctgaccccggaccaggtcgtggccatcgccagcaatagcggcggcaagcaggcgctggagacggtgcagcggctgttgccggtgctgtgccaggcccatggcctgaccccggaccaggtggtggccatcgccagcaatggcggcaagcaggcgctggagacggtgcagcggctgttgccggtgctgtgccaggcccatggcctgaccccggaccaggtggtggccatcgccagcaatagtggcggcaagcaggcgctggagacggtgcagcggctgttgccggtgctgtgccaggcccatggcctgaccccggaccaggtggtggccatcgccaacaataacggcggcaagcaggcgctggagacggtgcagcggctgttgccggtgctgtgccaggcccatggcctgaccccggaccaggtggtggccatcgccagcaatagtggcggcaagcaggcgctggagacggtgcagcggctgttgccggtgctgtgccaggaccatggcctgaccccggaccaggtggtggccatcgccagcaatggcggcaagcaggcgctggagacggtgcagcggctgttgccggtgctgtgccaggaccatggcctgaccccggaccaggtggtggccatcgccagccacgatggcggcaagcaggcgctggagacggtgcagcggctgttgccggtgctgtgccaggaccatggcctgaccctggaccaggtggtggccatcgccagccatggcggcggcaagcaggcgctggagacggtgcagcggctgttgccggtgctgtgccaggaccatggcctgaccccggaccaggtggtggccatcgccagccacgatggcggcaagcaggcgctggagacggtgcagcggctgttgccggtgctgtgccaggaccatggcctgaccccggaccaggtggtggccatcgccagcaatattggcggcaagcaggcgctggagacggtgcagcggctgttgccggtgctgtgccaggaccatggcctgaccctggaccaggtggtggccatcgccagccacgatggcggcaagcaggcgctggagacggtgcagcggctgttgccggtgctgtgccaggaccatggcctgaccccggaccaggtcgtggccatcgccagccacgatggcggcaagcaggcgctggagacggtgcagcggctgttgccggtgctgtgccaggaccatggcctgaccccggcccaggtggtggccatcgccagcaatggcggcggcaagcaggcgctggagagcattgttgcccagttatctcgccctgatccggcgttggccgcgttgaccaacgaccacctcgtcgccttggcctgcctcggcggacgtcctgccctggatgcagtgaaaaagggattgccgcacgcgccggaattgatcagaagaatcaatcgccgtattcccgaacgcacgtcccatcgcgttgccgactacgcgcaagtggttcgcgtgctggagtttttccagtgccactcccacccagcgcacgcattcgatgacgccatgacgcagttcgggatgagcaggcacgggttggtacagctctttcgcagagtgggcgtcaccgaattcgaagcccgctgcggaacgctccccccagcctcgcagcgttgggaccgtatcctccaggcatcagggatgaaaagggccaaaccgtcccctacttcagctcaaacaccggatcaggcgtctttgcatgcattcgccgattcgctggagcgtgaccttgatgcgcccagcccaatgcacgagggagatcagacgcgggcaagcagccgtaaacggtcccgatcggatcgtgctgtcaccggcccctccgcacagcaatctttcgaggtgcgcgttcccgaacagcgcgatgcgctgcatttgcccctcagctggagggtaaaacgcccgcgtaccaggatcgggggcggcctcccggatcctggtacgcccatcgctgccgacctggcagcgtccagcaccgtgatgtgggaacaagatgcggcccccttcgcaggggcagcggatgatttcccggcattcaacgaagaggagctcgcatggttgatggagctattgcctcagtcaggctcagtcggagggacgatctga

SEQ ID NO: 1335 - DNA, 3864 bp, Xanthomonas oryzae
  source 1..3864: mol_type = genomic DNA
atgcctgccgtcggcacgccgcatacagcggctgccccagcagagtgggatgaggcgcaatcggctctgcgtgcagccgatgacccgccacccaccgtgcgtgtcgctgtcactgccgcgcggccgccgcgcgccaagccggccccgcgacggcgtgcggcgcaaccctccgacgcttcgccggccgcgcaggtggatctacgcacgctcggctacagtcagcagcagcaagagaagatcaaaccgaaggtgcgttcgacagtggcgcagcaccacgaggcactggtgggccatgggtttacacacgcgcacatcgttgcgctcagcaaacacccggcagcgttagggaccgttgctgtcacgtatcagcacataatcacggcgttgccagaggcgacacacgaagacatcgttggcgtcggcaaacagtggtccggcgcacgcgccctggaggccttgctcacggatgcgggggagttgagaggtccgccgttacagttggacacaggccaacttctcaagattgcaaaacgtggcggcgtgaccgcagtggaggcagtgcatgcatcgcgcaatgcactgacgggtgcccccctgaacctgaccccggcacaggtggtggccatcgccagcaataacggcggcaagcaggcgctggagacggtgcagcggctgttgccggtgctgtgccaggcccatggcctgaccccggcgcaggtggtggccatcgccagccacgatggcggcaagcaggcactggagacggtgcagcggctgttgccggtgctgtgccaggaccatggcctgaccccggaccaggtggtggccatcgccagcaatagtggcggcaagcaggcgctggagacggtgcagcggctgttgccggtgctgtgccaggaccatggcctgacaccggaccaggtggtggccatcgccagcaatggcggcggcaagcaggcgctggagacggtgcagcggctgttgccggtgctgtgccaggaccatggcctgaccccggaccaggtggtggccatcgccagccacgatggcggcaagcaggcgctggagacggtgcagcggctgttgccggtgctgtgccaggaccatggcctgaccccggaccaattggtggccatcgccaacaataacggcggcaagcaggcgctggagacggtgcagcggctgttgccggtgctgtgccaggaccatggcctgaccccggaccaggtcgtggccatcgccagcaatggcggcaagcaggcgctggagacagtgcagcggctgttgccggtgctgtgccaggaccatggtctgaccccggaccaggtcgtggccatcgccagcaatattggcggcaagcaggcgctggagacggtgcagcggctgttgccggtgctgtgccaggcccatggtctgaccccggcgcaggtggtggccatcgccagccacgatggcggcaagcaggcgctggagacgatgcagcggctgttgccggtgctgtgccgggcccatggcctgaccccggcgcaggtggtggccatcgccagcaatagcggcggcaagcaggcgctggagacggtgcagcggctgttgccggtgctgtgccaggcccatggcctgaccccggcgcaggtggtggccatcgtcagccacgatggcggcaagcaggcgctggagacggtgcagcggctgttgccggtgctgtgccaggcccatggtctgaccccggaccaggtggtggccatcgccagcaataacggcggcaagcaggcgctggagacggtgcagcggctgttgccggtgctgtgccaggaccatggcctgaccccggaccaggtggtggccatcgccagccacgatggcggcaagcaggcgctggggacggtgcagcggctgttgccggtgctgtgccaggaccatggcctgaccccggaccaggtggtggccatcgccagcaataacggcggcaagcaggcgctggagacggtgcagcggctgttgccggtgctgtgccaggaccatggcctgaccccggaccaggtggtggccatcgccagccacgatggcggtaagcaggcgctggagacggtgcagcggctgttgccggtgctgtgccaggcccatggcctgaccccggcgcaggtggtggccatcgccagcaataacggcggcaagcaggcgctggagacggtgcagcggctgttgccggtgctgtgccaggaccatggtctgaccccggaccaggtggtagccatcgccaacaataacggcggcaagcaggcgctggagacggtgcagcggctgttgccagtgctgtgccaggcccatggcctgaccccggcgcaggtggtggccatcgccagcaataacggcagcaagcaggcgctggagacggtgcagcggctgttgccggtgctgtgccaggcccatggcctgaccccggcgcaggtggtggccatcgccagcaataacggcggcaagcaggcgctggagacggtgcagcggctgttgccggtgctgtgccaggcccatggtctgaccccggaccaggtggtggccatcgccagcaataacggcggcaagcaggcgctggagacggtgcagcggctgttgccggtgctgtgccaggcccatggcctgaccccggaccaggtggtggccatcgccagcaataacggcggcaagcaggcgctggagacggtgcagcggctgttgccggtgctgtgccaggcccatggcctgaccccggaccaggtggtggccatcgccagcaataacggcggcaagcaggcgctggagacggtgcagcggctgttgccggtgctgtgccaggaccatggcctgaccccggcgcaggtggtggccatcgccagccacgatggcggcaagcaggcgctggagacggtgcagcggctgttgccggtgctgtgccaggaccatggcctgaccccggcgcaggtggtggccatcgccagcaatggcggcggcaagcaggcgctggagagcattgttgcccagttatctcgccctgatccggcgttggccgcgttgaccaacgaccacctcgtcgccttggcctgcctcggcggacgtcctgccctggatgcagtgaaaaaaggattgccgcacgcgccggaattgatcagaagagtcaatagccgtattggcgaacgcacgtcccatcgcgttgccgactacgcgcaagtggttcgcgtgctggagtttttccagtgccactcccacccagcgtacgcatttgatgaggccatgacgcagttcgggatgagcaggaacgggttgttacagctctttcgcagagtgggcgtcaccgaactcgaagcccgcggtggaacgctccccccagcctcgcagcgttgggaccgtatcctccaggcatcagggatgaaaagggccaaaccgtcctgtgcttcggctcaaaccccggatcaggcgtctttgcatgcattcgccgattcgctggagcgtgaccttgatgcgcccagcccaatgcacgagggagatcagacgcgggcaagcagccgtaaacggtcccgatcggatcgtgctgtcaccggcccctccgcacagcaatctttcgaggtgcgcgttcccgaacagcgcgatgcgctgcatttgcccctcagctggagggtaaaacgcccgcgtaccaggatcgggggcggcctcccggatcctggtacgcccatggctgccgacctggcagcgtccagcaccgtgatgtgggaacaagatgcggcccccttcgcaggggcagcggatgatttcccggcattcaacgaagaggagctcgcatggttgatggagctattgcctcagtcaggctcagtcggagggacgatctga

SEQ ID NO: 1336 - DNA, 3696 bp, Xanthomonas translucens
  source 1..3696: mol_type = genomic DNA
atggatcccattcgtccgcgcaggccaagtcctgcccgcgagcttctgcccggaccccaaccggatagggttcagccgactgcagatcggggggtgtctgcgcctgctggcagccctctggatggcttgcccgctcggcggaccgtgtcccggacccggctgccatctccccctgcgccctcgcctgcgttctcggcgggcagcttcagcgatctgctccgtccgttcgatccgtcgattcctgatacatcgcttgttgattcgatgcctgccgtcggcacgccgcatacagcggctgccccagcagagtgggatgagatgcaatcggctctgcgtgcagccgatgacccgccacccaccgtgcgtgtcgctgtcactgccgcgcggccgccgcgcgccaagccggccccgcgacggcgtgcggcgcaaccctccgacgctttgccggccgcgcaggtggatctacgcacgctcggctacagtcagcagcagcaagagaagatcaaaccgaaggtgcgttcgacagtggcgcagcaccacgaggcactggtgggccatgggtttacacacgcgcacatcgttgcgctcagccaacacccggcagcgttagggaccgttgctgtcacgtatcagcacataatcacggcgttgccagaggcgacacacgaagacatcgttggcgtcggcaaacagtggtccggcgcacgcgccctggaggccttgctcacggatgcgggggagttgagaggtccgccgttacagttggacacaggccaacttctcaagattgcaaaacgtggcggcgtgaccgcagtggaggcagtgcatgcatcgcgcaatgcactgacgggtgcccccctgaacctgaccccggcacaggtggtggccatcgccagcaataacggcggcaagcaggcgctggagacggtgcagcggctgttgccggtgctgtgccaggaccatggcctgaccccggaccaggtcgtggccatcgccagcaatggcggcggcaagcaggcgctggagacggtgcagcggctgttgccggtgctgtgccaggaccatgacctgaccccggaccaggtggtggccatcgccagccacgatggcggcaagcaggcgctggagacggtgcagcggctgttgccggtgctgtgccaggaccatggcctgaccccggaccaggtcgtggccatcgccagcaatggcggcggcaagcaggcgctggagacggtgcagcggctgttgccggtgctgtgccaggaccatggcctgaccccggaccaggtggtggccatcgccagccacgatggcggcaagcaggcgctggagacggtgcagcggctgttgccggtgctgtgccaggaccatggcctgaccccggatcaggtggtggccatcgccagccacgatggcggcaagcaggcgctggagacggtgcagcggctgttgccggtgctgtgccaggaccatggcctgaccccggaccaggtcgtggccgtcgccggcaatattggcggcaagcaggcgctggagacggtgcagcggctgttgccggtgctgtgccaggaccatggcctgaccccggaccaagtggtggccatcgccaacaatcacggcggcaagcaggcgctggagacggtgcagcggctgttgccggtgctgtgccaggaccatggcctgaccccggaccaggtcgtggccatcgccagccatggcggcggcaagcaggcgctggagacggtgcagcggctgttgccggtgctgtgccaggcccatggcctgaccccggaccaggtggtggccatcgccagcaatattggcggcaagcaggcgctggagacggtgcagcggctgttgccggtgctgtgccaggcccatggcctgaccccggaccaggtcgtggccatcgccaacaataacggcggcaagcaggcgctggagacggtgcagcggctgttgccggtgctgtgccaggagcatggcctgaccctggaccaggtggtgtccatcgccagcaataacggcggcaagcaggcgctggagacggtgcagcggctgttgccggtgctgtgccaggaccatggcctgaccccggaccaagtggtggccatcgccagccacgatggcggcaagcaggcgctggagacggtgcagcggctgttgccggtgctgtgccaggaccatggcctgaccccggaccaggtcgtggccatcgccaacaatagcggcggcaagcaggcgctggagacagtgcagcggctgttgccggtgctgtgccaggaccatggcctgaccctggcgcaggtcgtggccatcgccagcaatggcggcggcaagcaggcgctggagacggtgcagcggctgttgccggtgctgtgccaggaccatggcctgaccccggcccaggtcgtggccatcgccaacaataacggcggcaagcaggcgctggagacggtgcagcggctgttgccggtgctgtgccaggcccatggcctgaccccggcccaggtcgtggccatcgccagccacgatggcggcaagcaggcgctggagacggtgcagcggctgttgccggtgctgtgccaggaccatggcctgaccccggaccaggtcgtggccatcgccagcaatggcggcggcaagcaggcgctggagacggtgcaacggctgttgccggtgctgtgccaggaccatggcctgaccccggaccaggtcgtggccatcgccagcaatggcggcggcaagcaggcgctggagacggtgcaacggctgttgccggtgctgtgccaggaccatggcctgaccccggaccaggtcgtggccatcgccagcaatggcggcaagcaggcgctggagagcattgttgcccagttatctcgcccttatccggcgttgaccgcgttgaccaacgaccacctcgtcgccttggcctgcctcggcggacgtcctgccctggatgcagtgaaaaagggattgccgcacgcgccggaattgatcagaagaatcaatcgccgtattcccgaacgcacgtcccatcgcgttgccgactacgcgcaagtggtgcgcgtgctggagtttttccagtgccactcccacccagcgcaagcattcgatgacgccatgacgcagttcgggatgagcaggcaagggttggtacagctctttcgcagagtgggcgtcaccgaattcgaagcccgctacggaacgctccccccagcctcgcagcgttgggaccgtatcctccaggcatcagggatgaaaagggccaaaccgtcctgtgcttcggctcaaacaccggatcaggcgtctttgcatggattcgccgattcgctggagcgtgaccttgatgcgcccagcccaatgcacgagggagaacagacgcgggcaagcagccgtaaacggtcccgatcggatcgtgctgtcaccggcccctccgcacagcaggctgtcgaggtgcgcgttcccgaacagcgcgatgcgctgcatttgcccctcagctggagtgtaaaacgcccgcgtaccaggatcgggggcggcctcccggatcctggtacgcccatggctgccgacctggcagcgtccagcaccgtgatgtgggaacaagatgcggaccacttcgcaggggcagcggatgatttcccggcattcaacgaagaagaactcgcatggttgatggagctattgcctcagtga

SEQ ID NO: 1337 - DNA, 193 bp, Xanthomonas campestris
  source 1..193: mol_type = genomic DNA
accctacagccgcacgaagttcagcaggcggcctaccagcttggtatgcgcctcaacgacagacccatcgaagatgcgcgcgaccgccaacgccttgccgacgccacagcgacggtgcacgagacacgactcgccttgcaccttggacgaggcaatgtcgatagcgatctgaggctcagcaacggacggagcg

SEQ ID NO: 1338 - DNA, 192 bp, Xanthomonas campestris
  source 1..192: mol_type = genomic DNA
cgtggcaaggtgtccgtcttggcggtcgacagcgtatggggatgcaccgacacgctgtccgtcatgaccgccgcgttgaagggtgtgaagaacgcgacgctgaccattctcaacacgggcacgcagaaggatgtcatcaactgcaagaccttcgccctggcgaatgcaaaggcgatggcggataacgatgac

SEQ ID NO: 1339 - DNA, 1077 bp, Xanthomonas campestris
  source 1..1077: mol_type = genomic DNA
atggggctatgcagttcaaagccgagcgtggtgggttcacccgtagcgggttcacctgagcattatttaacccacaccgcagagcagaccacgccctctacgccttcatcccccgaggcgcccatgtcacccagcctgcatggcttggtggcactcggctcttcgggaacgagacggggtcgcttccggcagccaaccctacagccgcacgaagttcagcaggcggcctaccagcttggtatgcgactcagcggcagacccatcgaagacgcgagcgaccgtcaacgccttgccgacgcgacagagacggtacacgagacacgactcgccttgcaccgtggacgaggcaatgtcgataacgatctgcggcttagcaacggacggagcgccacctacagctccctgtcttactgtctcggtgaaaatgacgaaaatttactggcgggcagcgcgctggctgccggggcaggcaactgtgatcacaatgcagcgattaacgcacgtcggcatgcggttcgcatggaggatggcgggcagatgatgaatgtacgcgactatgagcagacccacctctatgcgctgtaccagccaccaagctcggcagaggcggaagaatcacctgtagtcctcgactcgtggggcgacggtccggccgttctactaagggattcgcactgggccgaaacgtacggaacatccaccaacgtaattgaacgcttcgacaagcgcgatgcaatcgacgcgcttgccaggacaaccgcattcagagccgagatcgaggatccgcaaactgatctccatgcgaatgcgcgcgacctggagacagcatttctagccaaccccgcacccggcggtatcttttccgcgatgcctgtcatcgcgcccgagctggcccagagcacgcgtcaacggctgcaagagtactcaccgcggacgcgtcaagctctagccgccgatgctgcgcggcatgcctatggactggataacgcacagcccatctcgccgcgcacaactgctgcgatccttgaagatgcagagcgcctggatgccttgggtcgcccacccttgagttggtga

SEQ ID NO: 1340 - DNA, 1122 bp, Xanthomonas campestris
  source 1..1122: mol_type = genomic DNA
ctatgactggcgatcagagatagctgtctccagtgctgatcgaatctttgtggcgcgcgacgtctcgatcgacgcgctgtaacctcgatctacgcggaaggcctgaactcgttgctccagcgattcatgttgctgctggcgtccgcttgtgctgacatccgtgtaggcacttcctggttgggatcggtccacttcttctaccacgccgctgctgtgcgtgtgcttatagaagatggcgggcagcatctgttctccgagcatgagttcgactccagcgtcttccaagagcgcgtcgggcgaagccgcgccttgcccgtatggatcaatcgtcccgtggttgaccatgttgtcatgccactgatcgaacagggatgagtgctggtgagcgtgcaaagcgaaatgcagatcgaacatcaggcagtccgctgcagacttctgtgcccccacctgaatgaacgcaaatttggcattttcaccgagctgggacagggcctgacgccgcagttgggtatggccggtcacgaaagtgagcagtctcgccggctccagtacgattacgcttgcttcgccattaggtctccgtcgaacatccgctgccacgtgatgttcaccatcacgttctagtcgaagaacggcacgctgggaaactactgaggtggtttgctcggacaaagactgcaagaagtcaataggcgagtcaaagtgctggatgttcaatccagggtaacgacggttgtacaccgaggctaaggccggcagatttttgatgtcgagcttcagaagcgcctcatccggctgcttgttcgccgccaacattttcaaggtccgctctccgtacttcactatacttgagcggactcctgcatcttttgcatccgacagggagttggctaacagcttggttttcagtgcgactcgctcaggcaggccgctacgagaaaggtcaactttcttgccgcgtcttgcgagcccctgcaacgctgggtcagtggccgagtaagaagacgtggcctgagccggggtcccactgccctcttccgagggcgtggcctgctctgcgacgtgggctgcataatgctcaggtgagcctgccacgctcggctttgaaacgcatagacccat

SEQ ID NO: 1341 - DNA, 861 bp, Clavibacter michiganensis
  source 1..861: mol_type = genomic DNA
atgtcaaaaacgcattttcgcggtatttactttattgtcattcccatcgctcttgggctaatggccgccagttctacggtttggagcgcgttcgctaccgagggcgccaggcagacacgaccagtaattgcgggttcgcagcttgaattcgagttcggcggcgattgcactgcaggtgctgtggtacaaaaaaatagttggagtgcagtgttcttcgcaaaagagcgcgcgactagatacgtagtgactgctaatcactgtgttgcgcgcataggggaaagggtatttgttagaaacgagctcgagtctcgtcacggtcatgttccccccatcggaacggtttattggagatctgatgacgtcgatctagcgttaattaaaattgatcccattgttcacgtgtcgtacacgtgtgggagttcttcacatggcgcgccccactgcttgccggtgaccacctggacgccaaacgcccttcctcgggtgctcaccgcgtcgctgagaatgcggagcatatatgcccaacccgtaatcgggtacgataaccccgggctgaatgaagcttttgctacaagcggtagcaccactggtgtacaggtgaactggcggaatctatccgttcgtgcttggccaccgggtttcagggaccctcgaagcggagaccaagcagcatcttccacaactgactttttgcttccgggcgattccggagggcctgtatttaacccggatacgggtatgctatacggaataatgaccgatcaagttcctcatcgtctcacagagcagagcacgatggtgtatatcaagctatctcagtttttccatgagcagagagaatacaatctcgtgacacgttga

SEQ ID NO: 1342 - DNA, 1212 bp, Erwinia amylovora
  source 1..1212: mol_type = genomic DNA
atgagtctgaatacaagtgggctgggagcgtcaacgatgcaaatttctatcggcggtgcgggcggaaataacgggttgctgggtaccagtcgccagaatgctgggttgggtggcaattctgcactggggctgggcggcggtaatcaaaatgataccgtcaatcagctggctggcttactcaccggcatgatgatgatgatgagcatgatgggcggtggtgggctgatgggcggtggcttaggcggtggcttaggtaatggcttgggtggctcaggtggcctgggcgaaggactgtcgaacgcgctgaacgatatgttaggcggttcgctgaacacgctgggctcgaaaggcggcaacaataccacttcaacaacaaattccccgctggaccaggcgctgggtattaactcaacgtcccaaaacgacgattccacctccggcacagattccacctcagactccagcgacccgatgcagcagctgctgaagatgttcagcgagataatgcaaagcctgtttggtgatgggcaagatggcacccagggcagttcctctgggggcaagcagccgaccgaaggcgagcagaacgcctataaaaaaggagtcactgatgcgctgtcgggcctgatgggtaatggtctgagccagctccttggcaacgggggactgggaggtggtcagggcggtaatgctggcacgggtcttgacggttcgtcgctgggcggcaaagggctgcaaaacctgagcgggccggtggactaccagcagttaggtaacgccgtgggtaccggtatcggtatgaaagcgggcattcaggcgctgaatgatatcggtacgcacagcgacagttcaacccgttctttcgtcaataaaggcgatcgggcgatggcgaaggaaatcggtcagttcatggaccagtatcctgaggtgtttggcaagccgcagtaccagaaaggcccgggtcaggaggtgaaaaccgatgacaaatcatgggcaaaagcactgagcaagccagatgacgacggaatgacaccagccagtatggagcagttcaacaaagccaagggcatgatcaaaagcgccatggcgggtgataccggcaacggcaacctgcaggcacgcggtgccggtggttcttcgctgggtattgatgccatgatggccggtgatgccattaacaatatggcacttggcaagctgggcgcggcttaa

SEQ ID NO: 1343 - DNA, 318 bp, Phakopsora pachyrhizi
  source 1..318: mol_type = genomic DNA
atgaagttaatgcagctaatattctatatgctcaacatactagcactcacgatggcccataactgttgtgagctgtcaaagatgccaactcttcctgagataggcgtgatgtcctcgaagcctgttagaccaaagccaatccaatccacggcatcgaaaggcacaaagttcttgcctactacgctctgtatcatcaagtgcaagtttaacatctgtctggctcatgctaatgtcataaactccgtacaaattggtaatcggatgagggagagtaagggagctgtcaacttgaatgctccacgccaccattcattttaa

SEQ ID NO: 1344 - DNA, 549 bp, Phakopsora pachyrhizi
  source 1..549: mol_type = genomic DNA
atgcaaggtttttttcttgtttccattgcagttcaggttgctctcgtagttgctcaaggaaacacccccaccaaagttactgctcagcctcaggtaaacaactcgtctgctccggcaaacgcatctgctattgatctgccaaaaataatagctgttaattgtacacaagcctacatcgaaataactgacagctcaattaacggaactactattggcgcttgcaaaaggtttgaagattctgaaggatctttttgcaagcctgatgattgcattggcagtgccacttgcttatcctgcaaaaaagttaccgttggtgccactgcgaatagcaccgttgtctcgaactcaacagtagactctgtggtgtgccgcaaggactacttctttccaggaccgggttctaaatccaaccagtccctttgtacggatgagaaggatgataactacatctgcagtggtgtttgcacaagttttgctagctgctctcattgcgtcagcgctaaagacccagcacttgcaaaattaaaagagaagtctccaaaaaattaa

SEQ ID NO: 1345 - DNA, 786 bp, Phakopsora pachyrhizi
  source 1..786: mol_type = genomic DNA
  variation 532: note = a, c, t or g
ctactagcaagccaaaccataagctaatattttcagactgcattatagataaaaatcttgcaatgttatttacatgcctaatgaagatgataaataatgttatatttctatgttttttaagtacagaaaattactatacaaagagaggagctgcaaatgggtgaacccctacaaaaaaagagtcttcagcccataggcacttcaagcttgttcatttacaaatagtgctgccatccccattcctgagccaacacacatagatgtgacaaaaaggctggctctcgttcgctttgcttctgataaagcggttgctacctggcgagctcccgtggctccgagtggatgcccaaatgcaatagctccaccaaccgggttgactttatcaaacggaattccaagctcctttattgaatatacagcttgagatgcaaaagcctcattaatctcgtaaaagtctacttcctcctttctaattccggcttttaccattagcttgttgatcgcagagactgggccaacccccatgattcgaggtggtacgccgacagcaaccgctgtgtaaaacttgcctaatatcggcagccccagctttttggctacggagcgtcgaactagcaacacagccgcagctccgtcagacacttgcgacgcatttccggcatgagtagatcccgtcttgctgaatactggctttagtttgcttaaagactcggcagtgactccatcgcgaatgccatcatcagtggaaactaaaatctccttttcgtccccagttttcggatctga

SEQ ID NO: 1346 - DNA, 534 bp, Phakopsora pachyrhizi
  source 1..534: mol_type = genomic DNA
aacaacccacaaactatcaagatgccagcctcacaaaacgttcaaacttttggtaagaaaaaaactgctactgcagtagcgttttgcaaggacggaaagggtttgattcggattaatggagttccaattggactggtccagcctgaggtccttcgatacaaggtttacgagccaattttgattgctggcgctgatgctttctccaagcttgacatccgtgttcgtgtcactggtggtgggcacacttcacaaatttacgccatccgccaggcacttgcaaaggctgtagttgcattttacgcaaaatactatgatgccgcttctgctttagaattgcgaaaggttctcattcagtatgaccgaacactactagtagccgacccccggagaatggaacccaagaaatttggaggaaagggagcacgttccagattccaaaaatcttaccgttgatggaggtttgggtttttatttcctgctgttctattcctctatgagtaattcatgccatcacaaaattattgatcttccncc

SEQ ID NO: 1347 - DNA, 734 bp, Phakopsora pachyrhizi
  source 1..734: mol_type = genomic DNA
tgagggtgagaaagttaaacattaaaagtatcaaaaggatttaggaaaccatcgtaatctgcccgagatgatctccaatctgatcagaagtccggcaacgatcaaaaatcttaaaagctcaatcgtctatctgaaaaacccctacaatctggcaccgaaacccaccgcaatatttaatcaacaaaggttcatttctataaagcgatacacaaaggaacatgaatgggttaaatacgatgacgagaatcagatcgggacgattggaataactgattatgctcagaagagtctaggagatgtagttttcgttgaattgcctgaagaatcagctgcgattgccactggagatcaaattggagccgtcgagagtgtcaaagcggcatcagatatatttgctcctgtggcaggaacgatcaccgaagtaaactcaaagctaagcgaccaggccaatctgttaaacaaaagtcctgaagatgagggctggatagcaaagatcaaattatcttttcctcaagaggttgaaaatctgttaagcgaagaggcttacaaagctcattgtgaaggagaggaccattgaaaaaaaataagaaaaaaaataagcattcattttccagatgttaattgcatacatttaaatacctttaaaacaacaatattatgcaaaagacatcaaaccttttacacagtaaatatagttgctgcatttgatttcatgctaaaaataacaaatagaa

SEQ ID NO: 1348 - DNA, 867 bp, Ustilago maydis
  source 1..867: mol_type = genomic DNA
atgcacacgctcgatatccattctgccaccacggaagagattctctctctcgaaaacattcgctccgtcctcatccgactcgaagaaaccatctgtttccaactgatcgaaagagcacagttcgcacgtaatgccaaatgctacctaccaggaggtttcccgcaactcaaggaacgagaaggctggaacagctcctggctggcatggtttttgaaggagacagaaagcgtccatgccaaagttcgaaggttcgaggctcccgatgaatacccttttacagaccccaagctgcttcccaaacccatcctggaaccagtcacctatccagagctgctgtggaagcactcggtgaatgtcaacgatcagatcctcaagttttacgtcgactcgatcgtgccggaaatcacaaagacgctgggagagaacgccgatgatggacattacggctcttcggccatccgcgacattgaggttttgtcagctttgagtcgaaggattcatttcggaatgtttgtctccgaatccaagttccgcgccgaaccagctgcatttatcccgcacattctcaagcctaaccgcgaagcgctggcggcgctcatcacgaaacctgcggtcgaagcggcactgctcgtgcgcttagctgaaaaagccaaagtgtatggacaggacatggatcgtcccggcgccaacgcggaggaacgtgatcaggcacgcaagatcgaggtcgataccgtggtgaggatctacaagacgttcgtcattccgctgaccaaggaggtcgaggtggactacttgctgaccaggctggatggcgtgccggaagagcaagtgcgagagatgttgcagagcaacaagtttgtaagctag

SEQ ID NO: 1349 - DNA, 276 bp, Magnaporthe oryzae
  source 1..276: mol_type = genomic DNA
atgcagttctctcagatcctcaccgtcttgttccttggcgtctccgtcagcgcccttcccgccggcggtctgcccggcagccctggcagcgctgtccagaggtgccactgcccccctcgtggctcccacgcccacggctccctcgccgctcgggaggaagcgcccgaggccgaaggtgacgccaagatttccgcccgctacacctgccccaactgccacaagacgggcaaaggctgcgatgatggctggtgccaagtcgaaaagacgcactggtag

SEQ ID NO: 1350 - DNA, 675 bp, Magnaporthe oryzae
  source 1..675: mol_type = genomic DNA
atgcttttttattcattgttatttttttttcacaccgttgcgatttcggccttcaccaacattggcaccttttcacacccagtttacgattacaatccaattccaaaccatatccacggagatttaaaaaggcgggcttatattgaacgctattcccaatgttcagattcgcaggcctgcgaaattcgtgccgcgctaaaaagttgtgccgagctcgcctcgtggggctatcacgccgttaaaaatgacaatcggttatttagattaatctttaaaactgacagcacagatattcaaaactgggttcaaaagaattttaacgaaatttacaaggaatgtaacagggacgcggacgaaatttctctaacctgccacgataaaaatgtttatacgtgcgtccgagaaggagttcataatttggcgtatgcacttattaacgaaaaagaaattgttatatgccctcctttcttcaacaaccccgtaaacagcagggaaattactgccggtaaccaagatacagttatattacatgaaatggtgcatataattttaaaagagtggaaagattatggttgcgaatgggatgggattcacaaattggatagtacagaaagtattagaaaccccgacagttatgctatttttgcacaatgtgcacgttataaatattgttaa

SEQ ID NO: 1351 - DNA, 675 bp, Magnaporthe oryzae
  source 1..675: mol_type = genomic DNA
atgcttttttattcatttatattttattttcacaccgttgcaatttcggccttcaccaacattggcaccttttcatacccagtttacaattccaatccaattccaaaccatatccacggagatttaaaaaggcgggcttatattgaaccctattcccaatgttcaaattcgcaggactccgaaattcgtgccgcgctaaaaagttgtgccgaactcgcctcgtgggcctatcacgccgttgaaaatgacaatcggttatttgaattgatttttaaaactgacagcacaaatattaaaaactgggttcaaaataattttaacgaaatttacaaggaatgtaacagggacgcggacgaaatttctctatcctgccacgatacaagtgtttatacgtgcgtccgagaaggagttcatcttttgggctatgcaaagatgtacgaaaaacaagttgttttatgccctcatttctttgatcaccccgtaaacagcagggaaatcactgcccaaaaccaagatacagttatattgcatgaaatgctgcatataattctaaatgagtgggaagattatggttacgaatgggatgggattcacaatttggatagtacaacaagtattaaaaaccccgacagctatgctatttttgcacaatgtgcacgttataaaaattgttaa

SEQ ID NO: 1352 - DNA, 6302 bp, Magnaporthe oryzae
  source 1..6302: mol_type = genomic DNA
attgttatgttcgaagttttgttcatttcctccatcgtattttgaacctgatcgaccttctgcgcaactaaaccatacaatgttaatgtcatgtataagtataattgcataaaatttatacatgatttaacgacaaatttgcgttgagagctacctacctgcagcaatcacctcctcaatcctcttttccgccgccacctttctcggcacggtaactcctaggagtgttgataggaatcgtgtgatcgctgcgatcggtaaaacaatacaaacaaagtaacaaaactatattctctaattcattcttattcattcatggtctctctaggtaaaactgtaactatttacaagcctgcatggatctgttgggaaaactctgctccgtgtcttcagatcacgtggttgtgcacgtggatccacttactcgcatgtcagaggatgttattctccggcccgcccaatttgtccctggattatagcatccttcatccaacccggttcgcgctcgcaatcacaccatagtgggatcgccgaggttgtcctcgttctcgcctcggctggcggcgcataacgagattgtgtttttcgcctacacaggcctcagcgcagctttccgaatgctctacgtccgatttgacgcacactcacgtacacgtacagccagatttagtgggtaggaagagccatgtattgggtgtaggtaatgttgcaggctatatttaccgaagtcactgccattagtcattgacagaggccttcgtttttgacggtgttttagtgcaacaggtagtgctatctgagctagaacgcgtgttggagcttttatcatgctcctaacgctgactcagcgcttgttgtcatgtgacgacaaaatctatctgattatctaatgcaacacaccccccagttgactcctaataccttattgggattcaactgttacatagccccaaatacggcgcttcaacgccgtattctgaatgcgtatatctatctaaggaacaaaaaaaaagtgatgctgaatagctgtagcggtgcaaagcgcaccgcatctggattctgccactgtattgaaatgcgggcggtgaaacccctacaatggcgacgaatccgtagtattataccccctattgtgtaaatagagacaataggttgccgtaaaatcgtaataggcgcacgtcgctcatatatcccgctagcttttctaacttgtaaatcttgaccttgatcttgaccttataccataccaaccaaatcgtaaatattgccctgcttttatcggcctgcgcgcgtgctgacgatataacttatgtagcctcacaacaacagcagcaacaaaaagagtaggttcatgagcttttgcctctgtggcgcgccgcgcggtgcgcggtgcgttggatgaaagtttgctaattccgcccatatataatgtcgtttttcacgcccattaacgggagccgggcggagcgggcttcggcccgtcttatcttgtaaatatttaatcccctgttttctgtaatacttcaacgcattctggctaacttgttgtaggcgtgctgatgctgccgagcgcttggctttggcgcgggcgctggccgcctccccaaactgaattccgtctggtaatgtcttctgcctttggtctttttatatggtattgctgacattatgagacaggctgagaccgcctccgccgccaccaatacctttgctgccgctggcgctgcagctggcgctgccgaccgggctggtcccgtggtcgacgcgtcggctggcgttaccgtaagtgctcaacaccccttttgcgcatttaattcgctaattggttgtgcagacccagtcgaggaagaggaggagagaggaggaggatgagggggagggtgagggtcaccctaggcgctctgtaaatattctcacgttcctttcttattttctaggcgctcttgacactaatatgccgtacttagtcgcgtccatctcgtccccgtcgtgtgcggcctgacggactcatcccccgtcaggtcacatgcttcgggtgtgcgagggcgtttttggccggaactgcgaccggccattgcgcggatcagccgggcgcgcgctcccgtgctcgcggggcgcgtcctccgcgctgctggaactgccggggcgggcatacctgcctccctctcccagctgggggaccccttgagcgcgccgcgggtgagctgggccatgcgctcttttgctcaccgcgtacctctgccaaggaggtccagctccttcggaacgtggtcacgtaccacttccgggactggaccgaatcccaagcgaaggaattggcagctctccaggcgaggaagaacgcctgcgccaaagcctgtcactagggcttctggcgtgcctgtcgtgccgcaaggcgcacaaggtggcaccacctagtggtgcttaagccgtttctggggtggctttcgtggggggcatgccgggggtcggtggcggcgaccctgaacggtccgtcccatcacgggcatttattttgtgtcgttccctggtggcgctggcgccggccagtagataacataatatgcgggcgggcctcggtccagatcaagggtttttgtgttgttttttttttttttaaaacaaataaaacgttgcatgtcctgtcgccatgctctttaccgcgcttgtgaacctccctgcacctcgtgttgtgcgtcgtatagattcaggagcgccctgaaatgctcgaatttactcagggagagtggttttgtaagtccgtctgcaggcatcagctcagtctccaggtaggtaactgtaaagctttaaccctaaggcatacattggagaacctcagtgtattaggcgctattaacgaaaattttaaaattgaagagaagagagaaattacaattaacgacgcgctggagagacgcgcttaaatctggacttagtggaccctttgtccgatccctggctcggcgtggagccgaattgtgattctgagggtaggtctgggggcctgatcctcacattattattaatatgtttgcatagttataagtttacttgcattattataattttacctccactactattaataactttcaataacttactattaatttacttgcatgatttctaattttattgcattgttactaattttactgcattattgtcgatttaattaagtttctattagctcaattacgttcttactaattcaatttcgctgttattgatgcgaattcccttactagttatttacaaagtagttatataaaagctggcgtatgaaaaactttacttggaagtaataggagtgttggttgagattttacaagttccaaaaaccacgattaagtttgccgaacattattcttacacattaaagctcttacaatgaaattcaacaaaactatccctctctatattcttgcctttttctcgaccgctgtaatcgctggtggtcgcaaatggactaacaaagttatttataacgacaaaggcgaaagggagggctcaatatcaattagaaaaggcgcggaaggcgacttcaactgtggccccggttaccctggggggcccgacaggatggtgcgggttcatgaggataatgggaacattcgcggaatgcccccgggctaccgtttaggccctgatgacaaagaagataaaagggataaccagtactatagccgaaacggatatcatgttggcgatggtccggccgagtaccaaaatcacggtggaggacaatggggtgacggatattatggaccgcctggcgaaattaccaatcaacacgggaaacgtcagggagatcagggctgccatattatgtaaactgctggaatagggttttatttggcgtttatttatattctaagctactttgctacgtcgttttacttgaaataatggagtggagataaatataaaaagtacaaggtgtaaaacataagtaggaaaaagtagaaaagaaataaacgaaaaataaaatcctaaaagagacggaaaaagtaaataaaagaaaggaaaacatacgcgtacttagaaataaaggaaactagcgagcgtggttagtaaaaggaaaataatggataataaaataaaaataaaaataaaaataaaaataaaaataaaaataaaaataaaaataaaaataaaaataaaaataaaaataaaaataaaaataaaaataaaaataaaaataaaaataaaaataaaaataaaaataaaaataaaaataaaaataaaaataaaaataaaaataaaaataaaaataaaaataaaaataaaaataaaaataaaaataaagaataaaaataaaaataaaaataaaaaataaaaataaaaataaaaataaaaataaaaataaaaataaaaataaaataagagtaaaactaaacacaaaaacaaaagaaaagggatattaattccgtcgtggtaaatcgtttgcaatcgaaattgcaaccgtcgttctggaccgcaataacgccaacgaaatcgacgtatccaaccaatggatactacaggacctattagcttttgcagctgtttataggcctgggcagtgcttttttccataaggcctccggcacttataataatcggatggaaaaaaggatccaaaatatcacggccaggcgtacattggaaaacctcagtgtattaggcgctattaacgaaaattctaaactgaagagaagagagaaattacaattaataacgcgctggaaaaacggctttaaatccggagttagttcaccctttgtccgatccctggttcgacgtggagccgagtcgtgattctgagggtaggtctgggggctgtgatatttggaccataagatcaccagaccctaaccctgacccctgatcaacgacccaccagggtaataccttcatcgacgtcgcgtcaaatttaaaactttgtttgtttcctttcctttccttagagtagaattctcgtcgataaatgccaaaagactaatttccgtgctatatttaccccgggccgtaacacaattctactttcaaaagaatcgctggcctaacgattaataaataaggcacagtaacttatctttacgccgctggcgaacgacgaaaataaatccgcatttgacaaaccagacccgaccggagattgacaaagacgttaattacaaacccagaacgacccccaatccatacccaggttaaagaaccatccacctgcgagcaggaaaattacaaaggttggatttcgaactggatttcgaacaaaacgggagcaaaacaaatcgctttaccgacgacccgacccgaaccaaaaagtgaaaccgattttacgccaaactccgatttcaccctcgaaaacgaaatcgaagttaattccctttcgaacaccgcgtggcctaataataaaaacgcctgaggaaaatttagacgaattcgaatttagcaaaaataaggcatacaacgccggaaataaaccccaatataatggtaaacggaaataatttaaccagcgagatcgctaggttacaaacggttattacacgcctgcaaaccgaaaaacaaaataattaaccggaacacccgacaagccatacccgaaaatagcgcctttggagggcaccaggttcgaaccgaccggctttagccagcaggaaagcatttaaaccgtacggccataaattaaaaaggcagccacacccgcatattaataaaagagccaaaagtaaaggatcagatccaggtatattttccggcagtttaaccacttttaaccgctggattacgaaattagcagattatttcgaaaaggataacacaaccttccgaactaaacgaaaccgcatggcaaaactgttcagcctattggacgaccgaccagcaacgatgtgaggatcaggcccctagacctaccctcaaaacgactcggctccacaccgagccagggatcggtaagttgatcagtaggtgattggtgtttgcgatcacacattttgtgttgctcagaatttataaactccaaagtttaattttgaatgcgtgtgggccgaataaccgggccgccagatccattatacagaaactctatccaacaacatgttggttggttttcatgtgcgagagcaagccccaaaggactgagagaacggctagaagtttaacaaacctcggtgattgggatatcacactgctccataacgataaaataataatatgctgggccctttacaatcgcatttttttctcgacaaagacaaacccttaatgtcccaagtttaccgaacaaccaaaattccgaaaaaggtcttttt

SEQ ID NO: 1353 - DNA, 438 bp, Magnaporthe oryzae
  source 1..438: mol_type = genomic DNA
atgaaatgcaacaacatcatcctcccttttgctttggtctttttttcgaccactgtaaccgccggtggcgggtggactaacaaacaattttacaacgacaaaggcgaaagagagggctcaatttcaattaggaagggctcggaaggcgattttaactatggccccagttatcctggagggcccgataggatggtacgggttcatgaaaacaacggcaacatccgcgggatgcccccgggatattctctaggccctgatcatcaggaagataaaagcgatcgtcaatattataacaggcacggatatcatgttggtgatggacccgccgaacacggaaatcacggaggcgggcaatggggcgacggatattatggaccgccaggcgagtttacacatgagcaccgtgaacagcgagaagagggctgcaatattatgtaa

SEQ ID NO: 1354 - DNA, 408 bp, Cladosporium fulvum
  source 1..408: mol_type = genomic DNA
atgcactacacaaccctcctcctaagcactctcctagtcggcacagccctcgcccaacccacaaatcctcctgcgaagactcccaagaaggcccccaaaactcaaccatacaacccatgcaagccccaagaagtcatcgacaccaagtgtatgggtcccaaggattgtctctacccgaaccccgacagttgtacaacctacatacagtgtgtaccgctcgacgaagttggcaatgcgaagcctgtggttaagccatgtccaaaaggactgcagtggaacgataacgttggcaagaagtggtgcgactatccaaacctgagtacgtgtccggtaaagacgccgcaaccgaagccgaagaagggaggtgtcggagggaagaaggcgtcggttggacatcctggctattga

SEQ ID NO: 1355 - DNA, 1062 bp, Botrytis cinerea
  source 1..1062: mol_type = genomic DNA
atgggttgcggtatgagcactgaggagaaggagggaaaggcgaggaacgaggagattgagaaccaactgaagagggacaagatgctgcagcgaaatgaaatcaagatgcttcttcttggagctggtgaatccggaaagtctactatcttgaaacagatgaagcttatccacgagggaggttactcgcgcgacgagcgagaatcgttcaaggaaattattttcagcaacacagtccaatcaatgcgcgttatcctcgaagccatggaatccctggaattacctctcgatgatcaaagagcagaataccatgttcaaaccatcttcatgcagccacaacaaattgaaggagataatttaccacccgaggtcggaagtgctattgcagctttatggaaggatgctggtgttcaagattgtttcaagcgatcaagagaatatcaattgaacgactctgcgagatactactttgataacatcgagagaatcgctcagcatgattacatgccaaacgatcaagatgtccttcgctcccgtgtcaagaccacgggtatcaccgaaacaaccttcatcattggagacctcacctaccgcatgttcgatgttggaggacaacgttccgagcgaaagaagtggatccattgctttgagaatgtcactacaatcctcttcttggtcgctatctccgagtacgatcaattacttttcgaagatgaaactgtcaaccgtatgcaagaagcactcacacttttcgactcgatttgcaattcaagatggtttatcaagacctcaattatcttgttcttgaacaagatcgatagattcaaggagaagcttcccgttagtcctatgaagaactacttcccagactatgaaggtggagatgattacgccctcgcatgtgactacatcctgaacagattcgtcagtctcaaccagcacgagaccaaacaaatctacacccatttcacttgcgctaccgacactacgcaaattagattcgttatggcggctgtcaatgacattatcatacaagaaaacctccgcttgtgtggtctgatataa

SEQ ID NO: 1356 - DNA, 1737 bp, Puccinia sp.
  source 1..1737: mol_type = genomic DNA
atgtcacatcactttggattacgtaaaataaaactactgattttgctcttccttcaagttcatgggagtcaatgtgccatgaggaactttgctgcagatagagtccatggggtagaatcagtcatttccgggtccaagagctcatctaatcccatggcactgtctaagtccatggataaaccagacacatctgatttggtagattcaaatgttcaggcaaaaaatgatgggagcagatatgaagaagattttacagctaaatattctgagcaagtagatcatgtttctaagatcctaaaagagattgaagaacaagagcctggaactataattattgatcataaagcattcccaatccaagacaaatcaccaaaacaggtggttaatttcccttttccaaaaaagatgattacagaatctaattcaaaagacatcagagaatatcttgcaagcacatttccttttgaacagcaatcaactatattagacagtgtgaaatcaattgccaaagtacaaatagatgaccgaaaggcatttgatcttcaattgaaattcagacaggaaaacctggcagaactcaaggatcaaattatactttcactgggtgcaaataatggaaatcaaaactggcaaaagttacttgattacacaaataagttggatgaattgagcaacaccaaaatttcccctgaagaatttattgaggagattcaaaaggtattgtacaaggtcaaattggaatctacatcaacatccaagctttacagtcaatttaatctatcaattcaagattttgcacttcaaataattcattcaaaatacaagtcaaatcaaataagtcaaaatgatcttttgaagttgatcacagaggatgagatgctaaaaattctggcaaagaccaaggttctcacctacaagatgaaatattttgattcagcatcaaaaatgggaatcaataaatatatcagtactgagatgatggacctggactggcaattttcacattataagactttcaatgatgctttgaaaaaaaataaagcaagtgattcaagctatcttggatggctaacccatgggtattctatcaaatacggattatctcctaataatgaaaggagtatgtttttccaagatggaagaaaatatgctgaattgtatgcattttctaaaagtccccacaggaaaataatacctggggagcacctcaaagatctgttagctaaaatcaataaatccaaaggtatttttctggatcagaatgccttgctagataaaaggatctatgcatttcatgagttgaacactcttgaaacacattttccaggaataacttcatcttttacggatgatttgaaatcaaattaccgcaagaagatggaatctgtttctctcacatgccaggttcttcaagaaattggcaacattcaccggttcattgaatctaaagtcccatatcacagttccacagaatatggattgttttctatccccaagatattttcaatcccaatcgattataagcatggagaaaaggagaatttggtctcctatgttgactttctttactccactgctcatgaaagaattctccaggataattcaattaatcaactttgccttgacccattacaagaatccttaaaccgtattaaaagcaatatacctgttttcttcaacttagcttcccatagttcaccaatcaagccatccaatgttcatgaaggcaaattgtga

SEQ ID NO: 1357 - DNA, 13023 bp, Puccinia sp.
  source 1..13023: mol_type = genomic DNA
cccccccccccccccccccccgttgcatgccctgggcgagcttctcgtcaagaaaccattagctcactgtctcaggtcttgccttcagcgagagggtcgacggatgagtgattgtcgcagaaatgacattcagcatgatgctctcgctactcggcgactcgcaaggtcggcccacagctgcagtattcggcgcgacaaagctcaccaacacaggcaactggtgctacacctcacacatcgcatcaggaaaaaagctcagataagtacggcagcaacaagctgagatcaaagccctgcgataagtgccagttctgtttgagcgtggacggtcatcagaaagatgctgcatgcatttttcgttggtcattgtcatggcgaaacccaccttgcagcaacacgttagatgaccatataaatccttggaactcgcctgcgttagaatgcataaatacttgccgactcccagtagcttgtttgaattcggttgcgacgaagtcgctcatggatcatgtgcgtagaaatgccacgagcttgcaggcaagtcaagagagcgtacactccctccctcaatccagattccaaggtcctatgtatgctctgctgataccgcccttggacctataggttttggtacaattagatcatgactcaatcggcaaactcagaatgtgtaccgtggtttggttgaggctatcctatcgactccgagtaaccagaatgcccccgtcagtgcctctggttcttcggtgaaaactaagcacacacctataatttctttgtatgagttaatgcattgtcgattcgtcgtgacattgataaagagggtagctatacttcagccttggcaatcatgaaaggctaccttcgacccttatcggtttcgcgccggcctgaccttctttctttgatgccacttgtgagagtaacatgaataactgtgaggttagaactaaagacgctatgaagggggctcagccttgcaaattcagttctacatacccaattgtttggcattcagttttgttgtatgtgaccggtcttgtacatgtgattatatgcgctatgggttgatcaaacttgatcacgacttggcggatggcaagctgtgacaagagaggagtgtctctagggctgtataaggactcgaagtcgccgttacaccagttacacacctatttactttgttgtgtacatcgtgaaattggagctccactggcatatacatcattgactcaaaggtcaggttttcaccatcctgcctgaccagattagtcagtcctcacagactgattcaacataaatagaggccctccttaacattagacaattcttccacatcacctgacacacttcctacatagatacctgttcaaactaaagatatttattttcattccaacctatcaatcttcacatcatcccatcaaccaacatgtcacatcactttggattacgtaaaataaaactactgattttgctcttccttcaagttcatgggagtcaatgtgccatgaggaactttgctgcaggtgatttgcactgatatacctaccataattaaattttgtacagccttctgactatgatttatgtaccatgattcataactatctcccagatagagtccatggggtagaatcagtcatttccgggtccaagagctcatctaatcccatggcactgtctaagtccatggataaaccaggtgatttgtttgaatccttctatattttggcaatttggaaactgaattcaatttgcattactaataccttctattgtaacactccctctattattaaatatttacaagacacatctgatttggtagattcaaatgttcaggcaaaaaatgatgggagcagatatgaagaaggtaatcttatttcatccaaataaacttttaccttatattccatggaccacatgcacaaattggaaaatttggactgaatttgatttatttaaacattatcttccaccagattttacagctaaatattctgagcaagtagatcatgtttctaagatcctaaaagagattgaagaacaaggtgaccattttcaatttctctttccatgttgaaattactataaagaccctaaatctgattttcatgaattatgttgctaatttcagagcctggaactataattattgatcataaagcattcccaatccaagacaaatcaccaaaacaggtggttaatttcccttttccaaaaaagatgattacagaatctaattcaaaagacatcagagaatatcttgcaagcacatttccttttgaacagcaatcaactatattagacagtgtgaaatcaagtacgtttaaattataaattctagtagacagaaagtactttaatgtgctccatttgactttgattttgtcttctgaaaatcattttatgcagttgccaaagtacaaatagatgaccgaaaggcatttgatcttcaattgaaattcagacaggaaaacctggcagaactcaaggatcaaattatactttcactgggtgcaaataatggaaatcaaaactggcaaaagttacttgattacacaaataagttggatgaattgagcaacaccaaaatttcccctgaagaatttattgaggagattcaaaaggtattgtacaaggtcaaattggaatctacatcaacatccaagctttacagtcaatttaatctatcaattcaagattttgcacttcaaataattcattcaaaatacaagtcaaatcaaataagtcaaaatgatcttttgaagttgatcacagaggatgagatgctaaaaattctggcaaagaccaaggttctcacctacaagatgaaatattttgattcagcatcaaaaatgggaatcaataaatatatcagtactgagatgatggacctggactggcaattttcacattataagactttcaatgatggtgagatacattcaattgcagaaaaatgatcaaaattgaataatttaaaaatattgatgaatttgatcttccaatttttaaaaaatttgttggttcaataaaaattgaaatagctttgaaaaaaaataaagcaagtgattcaagctatcttggatggctaacccatgggtattctatcaaatacggattatctcctaataatgaaaggagtatgtttttccaagatggaagaaaatatgctgaattgtatgcattttctaaaagtccccacaggaaaataatacctggggagcacctcaaagatctgttagctaaaatcaataaatccaaaggtatttttctggatcagaatgccttgctagataaaaggatctatgcatttcatgagttgaacactcttgaaacacattttccaggaataacttcatcttttacggatgatttgaaatcaaattaccgcaagaagatggaatctgtttctctcacatgccaggttcttcaagaaattggcaacattcaccggttcattgaatctaaagtcccatatcacagttccacagaatatggattgttttctatccccaagatattttcaatcccaatcgattataagcatggagaaaaggagaatttggtctcctatgttgactttctttactccactgctcatgaaagaattctccaggataattcaattaatcaactttgccttgacccattacaagaatccttaaaccgtattaaaagcaatatacctgttttcttcaacttagcttcccatagttcaccaatcaagccatccaatgttcatgaaggcaaattgtgatgtttttttttacttcataattcaaatattttctttttctttttcttctgctcattcttttactatcaagaaagttcattccttgtgtgttaaatccttttatcataagaataatcaaatcatgttcaagcaaaattccattatattcaatccagaaacatttgattgaccattgaaatcatccaattttcttggagttgatttatgactgaattcatttccttaatcatttgaatttgtttcctgaattcttcttcttttcattttttctttcaagaaaatttccattattagggggtatcaaatataggaaatccaccatcagaaaccagtcacttttctaaaaacttttttttgcataaatgggccccaaaaggggttaaatggataaccaacatgtttaaaaaagggtggattttttcaaaccagtcaattaattaatggtggatttggttatatttgataccccctatttttgatttttatcttatcattttatccaaatacccaagaagaaaaaaaaagaatggaagaaacagaaacagaaaggggaaaattggtgataccaacttcctgatagttgaccctccaaagtctcagggccaccctggcaggtgtccacattgcctagtctgggatatttaggggtaagttagatgagtttgcaaactcatcagttccaaaccaaataaaattgtgcaattatctttattttggagccaaaggccagaaagagctggataattaggccccatttggttgtccataatttgtaattttgagtcaagatttggcgggagtttgtgcaaaaattttgtattgttttatatggcatggtccaaatccccaccaaaccttagcctgttgggtttcacagactgtgtgctttcacacatgttcttagctttcatttcttgtgacatttcatctgttgtctagtcctggagcagcagtcgtggaaggatctctcctcatccttccacgaccgcctctcgacactgcacagtgtctcaatgctccaggttagttttctctcttcttttctttctcttgtttctttttgttctttcttagttgatgaaatgcatcatccttccacgaccgcctctcgacactgcaccgtgtctcaatgctccagtcatccgtatcagtctagctcatcaggttatgagcccgcgctaggcttaatacagcaaccagcacgttaaaaaccggtacctcgagtggttgtcgtcgcttttgaaaggatcattctcaagtctcgttgggtgcgacacttctagccgtcgtaaactcgcatcacacaccagcaactgtcgtgccgtcgccgactctctacacactgcctcgactggaccttgcaatcaactgctgatcgggtatcaatcgactcagatcatactcgcgatcagaattcaaccatccttgttctgcgttcgtcgcgcgagtacatctctctaggccgcttcaggcctctccagacccatcccagtcgcctacatctctccaggcttcttccggcctctctacacctatcttggtcacttgcgaccccttctatcaaaccacaactgtttttttttctctcacccgtttgcatccactctccgatcgcgtctaagacttatcgatcggccgaacctttgtcaatctaataactcaccgcctcaagagtccgccgtcgcgatgtcaagcgaaaaggaagctcaaccggtaacatctatgtcgaccaaatccgcagtagctcgcttgccagtcctccagcctcctggtccagaatcaaatttcttggactgggagctggtgatgacagcctactttgattctgtgggtgttgactacgtcattgagtcccctctgcccaaaaaaccaacggagacatggatcgccgacaacaagacagtctgtgcggtgctcacccagaccattgactctgcgaacctcctctccatccgatcgtacaaacgcaacgcctatgggatgtggcaagcgctagtccaagcccaccaagactcaacaacaggaggccgagtctactggctacgcaaactcctgctcacgaagatggaaggcgatgatgttctagctcacatcaatacaatgtcaaaggcctatgatcgactcaactctctcatcactccagaaaggccacttactgcctccgatgttcattcagctgctctactcagctccatccccgacgactggatgggatgtgtgtcccatttgatgaatcaagaaggtgtcaagactgaaacaattgttctggccctaaagaatgaacatacccgccgacaatctcagacagaagttgtagctgcgtccgcttcctcgactaaggcaaagccccaaggcaacaaacgaactggcgaccgcagcaagaagccccgtcattgtgatttctgcaacgccgacggtcatgatctgaacaactgcaacaacactcgccgaattctagaagagcacaaagccaatcagaaaccgcgtgctgagaccaaaaatcaggagaaacgccaaggaaactcaggcaagcctgctgcaagagctggtcgaacatccgctgccaccctgggtcaatcctctcatatctatgaagaagacgaagagtctgactactctggttcagagctagaggtcacagcaggcaatgctgttgctaccttgtcaacatctcttggttattcaggcaccggtgacgccaacttggattccggatgctcaatgtcaatgaccccggatctctcgttggttgaaaacccaaagtcagatcgcactcccgtacgtctcgctgatcattccgtggttgaagcaacccacaagggcacctcgcggctcccgatcactggtgaagctactgtcaaaactcttgttgttccctccctacacgagcctctgctgtcgattgcaggaatgtgtgacgagggactcacagaggtcttcactataacctcgtgtgatatcttacaaaacaaggacgtcaaggttgaaggtaacattgctgggaaaggttacaggagaggaaatctgtattatctcccctcagagcctgtgagctcctgttcttccctctcattatcttcccatcctcctgatctatccattttcggctatcactcccgcttctcccatattggcctcaaaccactcaaaactcttctgaagtctaataacattatcccctcagtgatgaacgaaatcaatgttcaacgctgtcccacgtgcattcaggcaaaaatgccccgcaaggcgttcaaatcacgggccgctcaccgttcgacactccctggccaacttattcactccgacatggcgtcatatgaagtcgtctccagggaagggtacaaatactttatcacttttgttgacgattgttccaaacttctatctgttttccctatgaaattaaaaagcgactccttttcctgcttcaaaatatttcgtgcgttctttgagaaaagtggtgcccacaagattcttgcacttcgaaccgacaatggtggagagtacctgtcaaaagaattctccttgtatcttgcctcctctggaataaagcatgaaccaggtcctccacactcacctcaactgaatggagtcgcagaaaggaccaaccgaacaatcaacaatcttgtcagggcatctctgatccaagctcatctacccaaatcgttttgggcagatgctcttcgacactcgactttccccttcaactcatttccctgcaacactcccatgggtttcaaatctccctcttcaattcttcaagcccatgaagttgatctcaaatcagttcatccttttggttgccttgtctggtacaaattccaagaagcaaacaggaaatcattagatcataagggccgtgcatcaatactactctcctaccttccggatggaaatggtttttgtctgtgggatcttgagaaacgctctgtaatcaaatcccgtgatgttctgtttgaagatacaacctttccttatggagctgagcttaaatcttccccccaaccagtctcaatagaaattccctggccaatccctcaatcaccatcatatgaatccgaggtcaaaactccggttaaagatgctccagccggccggaccacagaatctctcccctctgaaccttcaaacagtgcccctctagacattcctcttaaaccaagatttgacaggcgtctgacggcctccatacacgctcctggaaacgccccaagagaacctgtccaaatttcatcggactctgactcctctcaaaacacacccttacattcgcctgcagatctctcctctgacatatctgtcatttcacttcttcctctgccccaacttccctccacaccatcaccaccctcttcccctcccaaatcccccacatctcccgctccgccatccttgccttctccccctcccaggtccccttcacctcctgctccgccatctccgcctaaacgtcgttcaaatcgtgatcgccgtgctccggattgttacggtcaatggtccaaaaatgcaaccaccgacagtgacattgacacacctaaaacatggcgccaactcctcaaatcacccaacaggcaccgatggctgaaggcagctgatgacgaatttgcctccctccttggcatgcagacttggaaacttgtcccacgtccagaaaagcggaaaatcattaagtccaaatgggtcttcaaagtcaagcgacgccctgatcggagtattcagaaacttaaagctcgtctggtggccatgggttactctcagatacatggacttgattacgatgaagtgttctcccctaccctgcggcttgagactctccggttgattctcagcttactagccaaccggaaatggaagggacgccaagtggatttcaagacagccttcctcaatggacatctggacaaaccaatatacatggaacaaccaccgggttttgaagatccccaacatcccgactgggtctgtgaagtcaatcgctctctttatggactgaaacaatcaccccgtcaatggaatattgaacttcacaaggcacttctagaactgggactctctaactcaaagtacaacccaaccctttacttcaaactccaatgtggcaaattagtcggagccctcaccactcacgtagatgatcttgctattgtgggtgaaccgggatttgtcgactctctcatctcctctatgggcaaacgattcaaaattggtgcagatgaagaacttaaccactttctctccttgaaaatcacccgcgacattccaaaccaatttgtcttcctaaaccagtctcactatatcactgaactctgtaacaggttccttaatgggaaggctactcctgtatctactccaactgactctgtcttcaagaatctccgccatcgttccgagtcagaacctatctcatcgggaccatatccacagctgattggttctctcctctgggtatctcaatgtacccgtccagacatttcctttgcagtcaatcgtctttctcaacacctccgcaatccatctgatgcacactggcatgcaggtctccgagttcttaactacctcgtcacaacacaacatctcaaactttggcttggaggttacctcaccctttcaggctattctgattctgactgggcagaggatcgggatgatcgacgctctacctcagcctacacctatcggattggtgacggtgccatttcctggaagtctcgaaaacaagcaacagtctctctctcaagcacggaagcagaatacaaagccctctcagactcatgcaaagaaggcttgtggcttcaacatcttctgacagaactccgtcttcggcctgacaccgcgatacctctacatgtagataatgaaggagccgaagctttggcgaaaaaccctgaacaccatgccagaaccaaacatatccatgcccgatatcacttcatcagagaatgtgtccaagaaggagatatttccctcctccatgtgtccacaaaagatatgttggcagacatgctgacaaagccattagctagagttgcattggaaaaacataggttgctctttggaattgtcccctaatctcacctctgtttcttctgttctcccctcctttttttctttcttttcctttttctccaatcatctgttatctttttctctcatcctttttcttcttttcctctctttctttcttccttttttttcttatctctttcttttctccatgtgctcagcaagggggggtgttgggtttcacagactgtgtgctttcacacatgttcttagctttcatttcttgtgacatttcatctgttgtctagtcctggagcagcagtcgtggaaggatctctcctcatccttccacgaccgcctctcgacactgcaccgtgtctcaatgctccaggttagttttctctcttcttttctttctcttgtttctttttgttctttcttagttgatgaaatgcatcatccttccacgaccgcctctcgacactgcaccgtgtctcaatgctccagtcatccgtatcagtctagctcatcatagccaaatcacaaatcataatttgtggccaaacagggccttagctatgtgagctgacatgtgagtcaagtgggttggatgtttgagctgggtaaaaatgtgaaaaacacgggttttcccaatttttccttaaagaaagctgccctaaccacgtaaagcctattaaatcctaaagcccctcacccaaaacacctcaaacaccacccagctcagcctgccctttggttcctaaccaaagataatagtggggttcacaatagtgttttttgcttcttgcacccattatttttttcttgctggcgcattgctgatgccaattttctcagcaaaatttttaagttcagtgctaaattttaagccagcagcagtgctgtggtttcttgcgcaagaagctatcatgaacccctctaatgtcatcattttcttcattttgtagccaaaattttatggttgatgcaggtacactacagttagcacaactggcccactgttgtctaaatacaagggactgtcctcaattttggttgttctctggtcttatgggaagagatgccatctgaaatttatgcttctcctacatttgctagcaatcaagtctagaccacctaattatatcatacaaaccttattgaccaaaaaatgaaggttatgtgtcacaaataatctatgtgtgacaaactcaaaataccaaaaaaggggtatagtagacatttatgtcagagacagtggacaacttcccatcacatctgcaggtctcccagaagtgatttggaggcctcgaaagctagatttcccaggaaaattctagacttttcgggtctaaattgacatctgcaagggtcccagatccaataggaagtcctccagtgttgaagtggcatgaggatagattatgtgagatcacagtgaaagtaagaatggaccaaagatgacaacatatttagttttgaaaaataacttatatgtattccacatgattcaagtccacaacagctgaattttgattaattgccccgcttgaatcctgatcactggattcaaaaagtgtagcagggcgagtaatcctatggggataatcggccaagaacgtaatctttaagcatcatagtccaaccaagtcctgagagcacacttctaccgaagttttgatttgtatttcttccacttcgcaatcgtgttttgagtgctgcaacaccggaccctgggccgacagtcttgcctcatcaaaccgactagaaaatctacaatcgagatcaactgagttttttaaatcctggttaattggtaactcagaactagccttaacatgactaacctccatggaaccatctctttgaagctcgctccggtccaacgctcgggtgctcctgaagttaaaatcaggaagatgcttcaatgcaaggttgatatttatagagacatgggatcactgactaccaccgaaaagcgagaacgtttcgacctgatgcgtgctcaaatccgcaaggattttaccgaaaagttctacttcttccttagtgtttcgattatagctatcactttggaatggatctcgctggacaattgattcattcttgcagtataaagctagcttctccagattcgacttccaacaagtaggactttttgcttgtatgctcttgctatactttccatctaaaatttccttaacccaatccatgtaacatactgctgtctccttcggatgagtcttggtgcaaagtaaaggagcatctagggttaggggattaagaagcagtgtagcatacccaaatcagctgcatggctcgattttggaaatgaatggcagcctgtcaactggtcgcctgaccttctatcgtttttactttgctgtactcatgggcaggcagttcatttaatcgtccttgacatcccgcctcagtgaaaaccgtgttgttggcgccctatgaaacccaagctatcactcagcgaacataagttgaatcttgaggagatggaacttaaaagtaatggctcaccctgaggattaatatgggtagttttatttctgatctcaaaccgtcaggaatgtggtcgggcttgcaagaaagaaggttacttggtaagttttgttatggtttgggtcgaacttgaacaaacttggatctcacttttgaaactttgcacgctcctaaaaaaggccaaacgcagagacagcagtcaattgagcggctaggcggaatgcggcgcacaagaacgctggcccattcgtccaggatgtcacgatcaattagggaaggatccccaaaattaaaccattgcaccgcacctacacctgggtaaaagtatcatactcagttttaaacgaccaccgacttgcattctcttgaagtagctcgaagcttgatataaacaggtttgtggtcatcgatttaattcattaggcgaaccttcatcccattcctctactgattctgggtatgcacaggagtcaaagcattcctgaaaagctcgttcaatgtatggctcgctgtcagaaacaagaaaattgcgtagtaagtgtcggattgcgttaggctcaacagaaaatccttcatcttgaaatttatcatcaacaaaaacccaaagaaagtgatttccgacttacagtgttggtggtggaatactacaaagacataaactgataactttggtcggaaaaacagccgccattctcagcagaatctcagacgaccaacaatgggtcccaagagcatgaaca

SEQ ID NO: 1358 - DNA, 1068 bp, Fusarium oxysporum
  source 1..1068: mol_type = genomic DNA
atgtctcgatcgaacccccctaacgctgcggggtctcgcaagatctcgttcaacgtgagcgagcagtatgatattcaggatgttgttggcgagggcgcctatggtgttgtctgctctgccattcacaagccctccggccaaaaggtcgctatcaagaagatcactcctttcgatcactccatgttctgtctaagaaccctgcgagagatgaagctgttgcgatatttcaaccacgagaacatcatctccattctcgatatccagaagccccgaaactacgagtcatttaatgaagtctacttgatccaggagctgatggagacggatatgcaccgagtcatccgcacccaggacctttctgacgaccactgccagtacttcatctaccagaccctccgcgccctcaaggccatgcactcagccaacgtgctgcaccgagacttgaagccctccaacctcctcctcaacgccaactgtgatctcaaggtttgcgattttggtcttgcgcgatccgctgcttcccaggaggacaactccggtttcatgactgaatacgtcgcgactcgatggtaccgtgcgcccgagatcatgttgactttcaaggagtacaccaaggctattgatgtgtggtcggttggctgcattctcgccgagatgctcagcggcaagcctcttttccctggcaaggactaccaccaccagttgacactcattctggatgtgctgggcacgccgactatggaggattactacggaatcaagtcgcgccgcgctagagaatacattcgatcgctccccttcaagaagaaggttcccttccgaactctattccccaagacctcggatctggccctcgacctgctcgagaagctcctcgcattcaaccctgttaagcgcattaccgtggaggaagctctgaagcacccataccttgagccttaccacgatcccgaggatgagccaacagcgcccccgatccctgaggagttctttgactttgacaagcacaaagacaacctgagcaaggagcagctgaagcagttgatctaccaggagattatgaggtaa

SEQ ID NO: 1359 - DNA, 588 bp, Fusarium oxysporum
  source 1..588: mol_type = genomic DNA
atggctgagatccgccgaaagctcgtcattgtcggcgatggtgcttgtggtaaaacctgtttgttgattgttttctccaagggcactttccctgaggtctacgtccccaccgttttcgagaactacgtcgccgatgtcgaggttgatggcaagcacgtcgagctcgcactatgggatactgctggtcaggaggattacgaccgtcttcgacccctgtcttaccccgactcccacgttatcctgatctgcttcgctgttgactctcccgactctcttgacaacgtccaggagaagtggatctctgaggttctgcacttctgccaaggtctccctatcattcttgtcggctgcaagaaggatttgcgatacgaccagaagaccatcgaggagctccgaaagaccagtcagaagcctgtctcccccgaggagggtgaggaggttcgcaagaagatcgctgcctacaagtaccttgagtgctcagccaagaccaacgagggtgtccgcgaggtgttcgagcacgctactcgcgctgctctgctgtcgcgaagcaccagtggtagcaagcacaagaagtgccttgttctgtaa

SEQ ID NO: 1360 - DNA, 1574 bp, Fusarium graminearum
  source 1..1574: mol_type = genomic DNA
atgttccatctactcatctatcccttatgggtcttggtagcactctttgctgtcataattgccaacctattgtatcagcagcttcctcgaaggccggacgagcctccactagttttccactggttccctttctttggaaacgcagtcgcttacggcctggacccttgtggcttctttgagaagtgccgagagaaggtagacactgatacatattctttgactccaacatctaactcctcttttagcacggagacgtcttcacctttatcttattcggtcgaaaaatcgtcgcttgccttggcgtcgacggcaatgattttgttctcaacagtcgcctccaggatgccaatgcagaagaagtttacggtccattgacaatccccgtctttggtagcgatgtcgtatacgattgtcccaactcgaagctcatggaacaaaagaagtttgtcaagtttggccttacgcaaaaagcactcgagtcacacgtccagttaatcgagcgagaggttcttgactacgtcgaaactgatccatccttttctggcagaactagcaccatcgatgtccccaaggcaatggctgagataacaatctttactgcctcacgttctttgcagggtgaggaagttcggagaaaactcactgccgagtttgctgctctgtatcacgatcttgaccttggatttagacctgtcaactttctgtttccatggttgccactgcctcacaaccgaaaacgagatgctgctcatataaagatgcgggaagtctatatggatatcatcaacgatcgaagaaaagggggcattcgaacagaagatggtactgatatgatagccaacttgatgggctgcacttacaagaacggacagcctgttcctgacaaggaaatcgcccacatgatgattactctactcatggcaggccagcactcttcatcttctgccagttcttggatcgtgctgcaccttgcttcttctcccgacattaccgaagaactctaccaggagcagctcgtaaatttgagcgttaacggtgctctacctccccttcagtactctgaccttgacaagctccctcttctccagaacgtcgtcaaggagactctccgcgtccactcttccatccactcaatcctgcggaaagtcaagagacccatgcaagttcccaattccccttacacgatcactacagacaaagtcatcatggcttcacctacagttaccgcgatgagtgaagagtacttcgagaacgccaaaacatggaaccctcatcgatgggacaacagagcaaaggaggaggttgacactgaagatgtcatcgactatggatatggggctgtgtctaaaggaacgaagagcccgtacttgccctttggtgccggtagacatcgctgcattggagagaagtttgcctatgtcaacttgggtgtcattgttgctactttggtgcgcaacttcagactttcgaccattgatggaagacctggagtcccagagacagactatacttctttgttctcacgacccgcccagcctgcgtttattcgatgggagcgtaggaagaagatatag

SEQ ID NO: 1361 - DNA, 1749 bp, Fusarium graminearum
  source 1..1749: mol_type = genomic DNA
atgggtctccttcaagaactggcgggccatccgctcgcccaacaattccaggaacttcccctgggccagcaagttggaattggctttgcagtcttcctcgtgctctccgtcgtcctcaatgtcctcaaccagctcctcttccgaaaccccaatgagccccctatggtcttccactggttcccctttgttggaagcaccatcacatacggaatggacccccccacgttcttcagagagaaccgtgccaaggtacgttcgatacagccgcattgagttggaaacacatctcgaacttagggagcgcagaaactcccgaggctgctctaccagaatcaaaacgatcaaaactaactttgtactagcacggcgatgtcttcacctttatcctcctcggaaagaaaaccactgtcgctgttggccctgctggaaacgacttcatcctcaacggcaagctcaaggatgtgtgtgctgaggagatctacaccgttctcactactcctgtctttggcaaggatgtcgtctatgactgccccaacgccaagctcatggaacagaagaaggtgagaaacagcagttatcaaaccgtttgacctgtatactgacatatgctcctagttcatgaagattgccctgaccaccgaagccttccgatcctacgttcccatcatctcctccgaggttcgcgattacttcaagagaagccccgacttcaagggcaagtctggcattgccgatatccccaagaagatggccgagatcactatctttactgcttcccatgctctccagggcagcgccatccgcagcaagtttgacgagtccctggccgctctctaccacgacctcgatatgggcttcacccccatcaacttcatgcttcactgggcccctctcccctggaaccgtaagcgcgaccacgcccagcgcactgttgccaagatctacatggacactatcaaggagcgccgcgccaagggcaacaacgaatccgagcatgacatgatgaagcaccttatgaactctacatacaagaacggtatccgtgtccctgaccacgaggttgcccacatgatgattgccctccttatggctggccagcactcttcttcttccaccagctcatggatcatgctccgtctcgctcagtaccctcacatcatggaagagctctaccaggagcaggtcaagaacctcggtgctgatctgcctcctctgacttacgaagaccttgccaagctgccccttaaccaggctatcgtcaaggagacccttcgtctccatgctcctatccactccatcatgcgcgccgtcaagtctcccatgcccgtccctggcactaagtatgtcattcccacttcgcacactcttctcgctgctcctggtgtcagtgctaccgactctgccttcttccccaaccctgatgagtgggaccctcaccgatgggaggcagactctcccaacttcccccgcatggcttccaagggcgaggacgaggagaagatcgactacggttacggccttgtcagcaagggttcagcttctccctacctgcctttcggcgctggccgtcaccgatgcattggtgagcactttgccaacgcccagcttcaaaccattgttgccgaggttgttcgcgagttcaagttccgcaacgttgatggcggtcacaccctgatcgataccgactacgcctcgctcttctcccgacctctggagcccgccaacattcactgggagcgacgccagtaa

SEQ ID NO: 1362 - DNA, 1655 bp, Fusarium graminearum
  source 1..1655: mol_type = genomic DNA
atggaatcgctctacgagactctgcggactctaccgctctcagtctcaatccctctaacaaccagcatcatcatcatcttgtccatcgtcaccaacgtggtcaaacaattatggtttcccaacccacatcgtccacccgttgtattccatatcttccccttcattggaagcaccgtacaatatggcatcgacccgtacgcttttttcttcgactgcagagataaatacggcgactgctttacctttattctccttggcaaatcaacgactgtctttcttggtcccaagggcaatgactttatcctcaacggcaaacacgccgatctcaacgccgaggacgtttatgggaaacttaccacgcccgtgtttggtgaggaggttgtttatgactgctccaatgctcgtttcatggaccaaaagagggtatgcaatttacgttcaacgacctggattcaatctaacccctccttgtgtgcagcttctcaaacttggtctcaccacagattccttacggtgctacatcccaaagttcgtcaaagaagtcgaagactatgttaaaaactcgccatacttcaagggtgacacaggaatcgtcaacattacagaagtcatggccgaaatcacaatctacacagcatccggatccctcctaggaaacgaagtccgatctatgtttgacagcacattcgccactctctaccgccatctagatgatggcttccaacccattaatttcgtcatgccaggtcttcccctcccgcaaaacttccgtcgaaaccatgctcgaaaggtaatggagaagcttttcagcgatattatttccaagcgtcgcgagactggcaatcaaggcgacgagacggatatgatttggatgcttatgaatgcacagtataaggatggggaacctcttccggatcaccatgctgcgcgtatgttgattgctatcctgatgggtggccagcataatactgctgttagtggtgcttggcttcttctcaatctggcccataagcctcatcttgttcaggaactgtacgaggaacagacccaggtccttggctcaccacaagagcctctgacatgggagaacttacagaaattaactctcaacggccaagtcatcaaggaaactctccgtcttcacagtccaatccactccatcctccgacaagtcaaatcacccatgcgagtccctggcactgaatgggtagtgccaccatcccacacactgctttcgtctcccggcacaatggcccgctcagaagaattcttccctcgaccatcagaatgggatcctcatcgttgggacaagattgaacctctcgtgaagaccgccgaagatggtcaaacagtggattacggttttggggtgatgagcaaatccgtcagcagtccttatttgccctttggagctggacgacatcgatgtgttggcgagaattacgcttatgcacagctgggagctattgttgccacgtttatcagattggttcacattgaacagcctgacccgaaggctcctcttccggcaccagattattctgtaagtttgctttgtcttgtgaagagggtttgctaatgattcttagtccatgttttctcggcccatgaaccctgccgagatccgatggcgtcgacgcgagacagtagaatga

SEQ ID NO: 1363 - DNA, 303 bp, Phytophthora infestans
  source 1..303: mol_type = genomic DNA
atgcgcagttttctctacggtgttcttgcctttgcggttttagctaggagcagcgccgtcgcagcattcccaatccccgacgagtctcgccccttgtcgaagacatctcctgacactgtggccccaagatcgcttcggatcgaggcccaagaagttattcagagcggccggggagacggatatggtgggttctggaaaaacgtagcccagagtactaacaagatcgtcaagaggccggatatcaagataagcaaacttatcgcggcggccaagaaggcaaaagcaaaaatgacgaagtcctga

SEQ ID NO: 1364 - DNA, 444 bp, Phytophthora infestans
  source 1..444: mol_type = genomic DNA
atgcgtctggcaattatgctgtctgctacggctgtcgccataaactttgcaaccagcagtgcaatcgaccaaaccaaggtcctggtgtatgggacgccagctcactacatacacgattcagccggcagaagacttcttcgcaagaacgaagagaatgaagaaacgtctgaggagcgagccccaaatttcaatttggcgaatctaaatgaggagatgtttaatgtggctgcgttgacggagagagcagatgccaaaaagctagcgaaacagcttatgggtaatgataagctggcggatgctgcatacatgtggtggcagcacaacagggttacgctagaccagattgacacgttcctgaagcttgcaagccgcaagacgcaaggcgcaaagtacaatcagatctacaatagctacatgatgcacctggggctcactggatattag

SEQ ID NO: 1365 - DNA, 1305 bp, Phytophthora ramorum
  source 1..1305: mol_type = genomic DNA
atgatggccaagttcagcccctgttcgcgcagtcgctgcgcgatactcttggccattttcgctctactgacatgcgtcggcgctgtctcggtggcatcggagtcgaacgtcgccaaaccaaaaacgttggatcgtgcccaagggcatcaactacgtggcttccaaggctatcgtagcttgaggactttcttggaggcaacgaaagacgacgacgactctgaagagagagtcttcaacgagtttgcgaagaagatggctcaagctgcaaagaacaagttgacgtcgaacaatcaagcgaccacaaacaagttgttcaagagcctccaggttgagggaaccggcgacaaactctttcaaagcgcgcagtttgagaagtgggcgaccacggtggccaagaacttcaagaagaaccccgagaaagctccaacgtcgatggcttccgcgctggtgggtcattacggtgatgaggctctggcggcgttgcttgttacggcgaagcaggacctcaaatcgagaattgttgctattcagctacaaaaggcccagctgcagaactgggagagcgctggcaaaacgggagacgatattttcaagcttctgaagctgaatggcaaaggcgaaaacctgtttgaaaccccgctggctcctgtttggatgtcttacgttactcagctgaataaggagaacccgggcgaggttatattttcgtccctcaagaaactgtacagcaacgaagttctcgcaaagatgattgtaggtgcgaagaatagtgcaagcactattgtcatggcagacaaactggagctgctgctgctgaacagatggctgagggaaggcaagacagtcgacgacattttcacgctactgaaactgaacaaggatggtgaaaaactccttcagagcccgatgttgaggacttggatctcttacgtccgatggcagagtaaggacccgtatggcatgattttggtcaagctcttgacatattacgacgagccatccttagcgaagattttgattgcggcacagcaggacgataaaacgtctcgccttgcccggaagttggaggaggtactgttgataaattggcggagtgacgggaagacagcagacgatgttttcaagcttctgctatcgaacaaggacgggggcaacgttcttgagaatccaatgctgagagtctggatggcctatttgactaaactggacaaagagaacgcggacaaattgatgttcgtggtgctgaaaaagcactacggtggtgatgaaggtgtggcgaagatggttaccgcagccaacaaatag

SEQ ID NO: 1366 - DNA, 714 bp, Phytophthora sojae
  source 1..714: mol_type = genomic DNA
ttaagcgtagtaggcgttgccgagcttggtctggaagttggcatccttaaacggcacgttggcgtcgccaaagtccgtgtcctccagtgccctgcgggccgcgtccgtgagctggtcccacatgatcagaggctgcgtctcgcccgcagttgacgtggccgacagcgcgtggttgatgaccacgtagctggacgagtagtcgatcttggcgctgttgccactgaagtaggaggagctcggcgggtagtacttgttgtatccgctgtgcgctgaagcggacagcgcgacgatcttcggactggacgcagcgatgtcgtcgacccagacaacgcacgcctcccagtcgtggcggtgccccagcccggtcaaggtttcgtctttgggcatgtaccacgagtacatgaaggcgtagacaccttggtacttgacggcgcgaccgtagatttgagtgccgtagccggagcccttgcacccggcgctctcgctgccggtaggattcaacccgccgctcgtgttgccgttattgtccacggcagggtacgggtggcagccgttgctgatgtggatttgaggcttgtacttgacggccgcttgttggagagcggtcgtaggcgtcggctgggtgaatggcacgacctggtcgtggttgataacgctggcgctcacgtacgcgaatgaagccagcgtagcgaggagtgcagggcggaggttcat

SEQ ID NO: 1367 - DNA, 360 bp, Phytophthora sojae
  source 1..360: mol_type = genomic DNA
atgcgcctcgttcaagttgtggtcgtcaccgctgcttccttcctggttgccactgacgctctttcgaccacgaacgcaaaccaggccaagatcatcaaaggaacgtcgcccggtggccacagcccacgacttctgagggcctaccaacctgatgatgaaggcgattcccccgaagaaaggacgctgccgaattctcaggtggcaaaaatccttaacaaactaggcgtcacctgggacgacgtcctgcgggactcggctttgttcgaaaggtaccaggagaaggctaacaagatcattgagaagcaaaaggcagcagcgaacaacgcgaagaggatcatcaaacgcgaccacactccttag

SEQ ID NO: 1368 - DNA, 2352 bp, Phytophthora sojae
  source 1..2352: mol_type = genomic DNA
atggatcctgacctttattggtcgcccaacgggcacgaacattcaagatttcgccggatgggactgaaagctgtgggtgccaagctcgtagatgcaggaacgcatggtcgcctgcagatgccagggctggcgttcctgagaatccccgaggacgacgactccatcgcaattctggtccgcacgctgttccagacgtggcgggcatgtctgcctcccgatgctacaacggattgctggaaggtctttgcaggtcgagaagcgtacagcgacgacaacccgccgctcagactgtcggatcgagtggggggtatgggggcaagtgacgacgacctgctcttcatcgaagtgccgacagaccacatcgtgtcgttgctgctaaagggggagcaagtcaagcatctgctggagtcgctcaagtggaaggagccggagcgactttgccgttcgactaggagaaattggccgtatcaaggagcgtctgagatcgcgaagaagctcaagcgttctctggtcaacaactataaggcctggaaagagaacaaccacgacggacactgccgagcgttgaacgtcatcctgagcggggctgggacgggcaagtcgagaatgttggacaacatgaaaagtttgttgtgtggggctgctaaactgtcgaaagacgaagatttgatggcgagaatggagagtgcgtacgtgtttcgaatcacgttcgcagatggccctgaacaagattcccaattaattgacgacatctacggtgatctggacatcagctaccgaatgatctatcagctctacaagcacaaaagggaagtagcgtggcctttgtttgtgtcgaagttgaaaggggtttactccaaaaccgtctttttcatcgaagaggtgctagtcttattggccaagctggagcaaatcgacaagcttcaggacatgacggtgctgctgtgcgtggatggcctcgacaggcttcaccacgacgggatcaagcagtcctcgaaatacctccgtgtaatgaacgcgatcatcagcttcctgaacgcttcgaaagcattcgtcgtctgtgcgtgtgcctcaaggctcgccagtccttttcatgaagtgcagatggtcttccgacagcggtgcacgtatttggttcctccaacgctaaacggcgacgaaatcctgtcgccacgtacccggatagagcagattttggtggaagatatgggtggtcacggtcgggcgctcgaagcgttggacgctgcgttacgtagtttccgagacgaaggtacagcgacgcccagcccaatggacattatcaaacgcgtgtgtgaaaggctgcaagtcgagtatgctgacctgtttaagtcgcccttactgaccagccgcaccatttgccaagaagtggtcgctgcgattctttatcgacaacaattgattttttccgagtctattggcgaaaagggcatgacagtggacgagcttctcggcgttggcttcttccgtttgagtcgagaaacccatggccacttgtcatgcgcgttcattctccttgagctcttgatgtcgaagcttgggaagaccggcgatatgatggaatacctcacacgttcggtgctcgggtggcaggatttcacgcacttcgtcgcctcgtaccgtgtcaaaaaatccacggtatttaatgctggtccgatttcgctggctgcattccacgctggcgctcgatttggacccatcgacggcatttgcgtcaaggaagcacggtcaagaaaggtggaagaggccaagtatcgcttggtcacaaagtcggatcgtagcgaggtaaacaaaactttctccaatcgcgacggcatgaagtgtaagacagacacggagacgatcgtcataaacagacccggtgcacctgcaggcggcgatattttcatgcaaactcagttgacggaaggcgaacaggaaacgcaccgctacgaggtgatccagtgcagacttgcgaaccaggatatcagcgaagtagtgtttcatgaagagcgagcaaaagctgcgggcgcctgggatgtctttctgctaattacgtcggcgaaatggaccagcgagttcgccctcccattgcggtgtggcatcgtttcgcacgacgagttctgtgaatactttggaccgtatgccacccgtgtgtataggagcctcgatcctcttaacatcaataccgcgtctcgtcaagaccttagtttggtggaaggactagacagcgctgctgttgaaacaattgtcgcgaaaagaccattttccagtattgaccaggccgtaagcattgtcacgatgggcaagaagagcaaagtttcagctgtgctgcgatcgctctgctgtgactga

SEQ ID NO: 1369 - DNA, 1032 bp, Phytophthora capsici
  source 1..1032: mol_type = genomic DNA
atggatcccacactgtggatcaagaaccccaagcactttggcgataattttcaaccgggtgaaggccaagttcacgtgctggtggtggttccggagggggtagttggctcagcgagcgagacttccaaaatggattttgtagacgataaggtcagcaaactgtatgaacactctgtgctgtccaagcgtacgcgatatgtccactcagaaatgagttcaagcaagggaaacaaacttgtgaaagagttgaaaattcgtgtgacgcctgtggacgcagttccattcaccggtggaagtccgactccagttgaagaatttgagtggataaagggccgtaccgaggagcagcagagtggacgttatcgtgattacgtggaagccaacattggcgatgtgttgaggaacaacaaactttgcgtgtttggtgtggaaaaaggtgcaaacatcctctccgttgaagtccctggttgcgatgttgatcttgctggtcgcacggatatgatcgtgctgagtgctatagtccaaaagtttccgcattacttaccccatttgcctggagtgaaaatgttgatcgaagtgaaaagggaggtgaactcagcatccgagttccaggctttgtcggaattgattgcaatggatttcatcgtcgacgaatcagtgatggcactgctcacgaacttgacaaaccattgggaatttttatgggtctccaacaagaacaacaaccgtcctatcatagcgactacgaccttaaccacgccaggtgaagcatttgaggtgattaggacgctacttgcgcagtcatcaacggcggataccgatattatgcttccatgcttggcagaacccgtgaagcgacggaagttaaaccagatgctgccgtttattggcgaagctagtggagatgggattcgtgagagtatcgaacgatactatgacatcgccagctgcttgggccccgacgttgacacggcgcgagctgtggctagacaagtcactcgatctattcccacgttgagttatttcagttaa

SEQ ID NO: 1370 - DNA, 807 bp, Phytophthora parasitica
  source 1..807: mol_type = genomic DNA
atgattgctcgcattaccgtagtcttcgctggtctcgtagctgtcgtctctggtgcctgctcgactccctcattcggcaactgtggctctgatgctgccggcgtgagctgctgccagagcacgcagtactgccaaccttggaacgccaactactaccagtgcctcgatctccctgctaaatgcgctcagcagttcccgaacgtcgacttcaatggagacgacatccagaccatctacggcattcagcccggagaatgctgcacgcgctgcagcgagactgctggttgcaaggcctacaccttcgtgaacagcaatccgggccaaccggcgtgctacctgaagagcggcactggtacaaggacgccctcggttggagcagtctcgggcatcttgacgggaacgtcaacaaccccgacgccgaccccaacaatgacgccaacgccaacgccgacgacatcatcgccaacctgcaccacggcaccgtatggctcctgtggctccagtaacggagctacgtgctgcccgagcggctactactgccaaccatggaacgacagtttttaccagtgcatccagccgccagcgaaatgctcgaaacaactcaccgacaaggactactacggcaacgacattaagaccgtctacgtgagcctcccgtcgctttgctgtgatgcctgtgctagcacggcaggatgcaaggcgtacacgtacatcaacaacaaccccggtcagcctgtgtgctacttgaagagcgctgcgggaactgccaccaccaagatcggtgctgtgtcggggactctcaactaa

SEQ ID NO: 1371 - DNA, 714 bp, Phytophthora parasitica
  source 1..714: mol_type = genomic DNA
atgaacgtccttacgttcctcatagcagccgcagtatcactcgctgtcgtccaagccgacgtgatctcgcacgatgccgttgtcccgttcgcccaacccacagccaccactacggaacagaaggctggtgtcaagttcaaaccgcagatccacatctcgaacggctgtcatccgtatcctgcagtggatgcgaacggcaataccagtggcggtctgaagcctaccggttcctctagtgcgggctgcaagggctccggatacggcagtcaagtctacggtcgagtggctacgtacaatggcgtctacgctatcatgtactcgtggtatttccctaaggactcgccagtcactggactggggcatcgccacgactgggagcacgtggtcgtctgggtcgacgatatcaaactcgatagtccgtcgatcatcgctgtgtcgccttctgcccacagtggctacaacatctactatccacccgaatccaacaccatcgacggctacagtgccaaggtggactactcgtccagttgggtggtgatcaatcacgcgctggacagcacgacggacgctggagaaacccaggatctgatcatgtgggatcaactcacggacgcagcacgcacggcgctggaaaatacggacttcggcgacgctaacgtccccatgaaggacggcaatttcctaaccaaggtaggcaacgcttactacgcttag

SEQ ID NO: 1372 - DNA, 1248 bp, Meloidogyne sp.
  source 1..1248: mol_type = genomic DNA
atggtgagcaggttttgttttgtatccttgctgatagcttgttggccaatttttggagtttttggggaagttttcttcaaggaggaattttcagatgagtcttggactgatcgatggattcaatctaaacataagagcgactacggaaaatttgagctttcttctggaaaatttttcggtgacaaggaacgcgatcaaggccttaaaacttctcaagatgctcgcttctatagcatctctgccaaattcccaaagaagtttagcagtaaaggaaagacgttggtaatccagtttagcatcaaacatgaacaggaaattgactgtggtggcggttatcttaaactcatggcctcaacaattaatcaagaggatttccatggggaaacaccttaccaccttatgtttggccctgatatttgcggacctggaacgaagaaagttcatgtcatcattaattataagggcaagaaccagctcattaaaaaggatattcgatgcaaagatgatgttcttactcatttgtacacgcttattctcaatccagacaacacccatgaagtccaaattgatggagagaaggcagaaagtggagagcttgaggctgattgggagttgttgccggaaaagaaaattaaggaccctgatgctaagaagcctgaggattgggatgagactgaatacattgatgatcctgaagataagaaacccgaagattgggacaagcctgaaactattcctgatccagatgcgaagaagccagaagactgggatgatgatatggacggagaatgggagccaccaaaaattgataacccaaattataaaggagaatggaaacccaagcagattaagaatccaaactacaaaggcaaatggatccacccagaaattgacaaccctgattacaaagtcgatgatgaactctatatgcgtgaagattggggctctgttggtattgacatctggcaggttaaatctggtacaatcttcgacaatattattgtgactgacagcattgatgaagcaaaggctcatgcgaaggaaacatttgagccattgcgcgatgctgaaaaaaaacaaaaggaggctgcagatgaggaagaacgcaagaagtttgaggaggaagaaaagaaacgtaaagaggaagaggaatctaaaaagaaggatgaggataaggatggtgatgaggaagaagataaggatgaggaggaggaaaagaaggtggaagaggagcatgatgagctttaa

SEQ ID NO: 1373 - DNA, 654 bp, Meloidogyne sp.
  source 1..654: mol_type = genomic DNA
atggatacttttattgactacataaatattattttgtttggcggtgggacaatgtctgatcaacaaaattatggaaaacatccaaaagaccccagcaaacctatgaaagaacgaatgttggctggggaactttattgtgttaatgatgttcttgaacaagaaatgaatttaacagctaaatggctggcccgtttaaacgattcttcgtgttccagtcgttctgaacggcaacaaattattagagaacgacttggggctatgggagaaggttgcgatatacggccacctttttattgtgattatggctcaaatatttttatgggaaaagatgtcattcttaactttaattgttgtattttggatgtggttactgtgacaattggagacggcactttgtttggacccaacgttcagatttatcctgcagatcacccgagggacaaagaaacacgtctggaaggctgggaatttggtcggcctattaaaataggcaaaaatgtttggattggtggaggggcaatgatacttcccggagtaactattggagatgatgctataattggtgctggttctgtagtgactagagatgttctgccaggcacaacagttgcgggaaatcctgcgcgtcctataataaaaaagtatgttaactga

SEQ ID NO: 1374 - DNA, 762 bp, Meloidogyne sp.
  source 1..762: mol_type = genomic DNA
atggaagcatctactatggatttacatttaacatccgattttttatttaatgcttcatctaccacagctcaagttgtctgtgaagatatgaatgtatatttatggaactctcgtcgcgatttaactacaaggccactaatcatgggcgtttttgcttctctctattcaacgatcattatactgagtcttgtaggtaatgcatgtgtacttgtagctatttcacggattagatctctgcaaacagttccaaatatgtttattttctcgctaagctgttcagatatgcttgtttgctgcatttctgcgactattacaccaattgctgcattcagaaaagactggattttcggccagtttctctgctcttttgctcccttcttggcaagtgtaaatcttcgtgttaagaaaagacatgaatggaaactaccgattagctcacaacaaaacgcagctacaaagcgacgacaaagaacaaatcgaatatgtttgattggccctagatccaatgaatcttctgtcagtgtctcgatcgaaggaaaaaaagagaaaactaaacatatgatgcataatgatgatgttggaaataattatcatcagcaacgattggaaaaagaattaatgaatgatgtgtataacgaatcgtgctataccgaagaggaacaaacattgatagcaaatttaaggattcattttgaagatatgaacgttatagataacgataatgacactttagatgaaagagacacagatgacaggatttga

SEQ ID NO: 1375 - DNA, 1047 bp, Meloidogyne sp.
  source 1..1047: mol_type = genomic DNA
atggaacctaaagagcagttttgccttaaagagacggatgagcaccgtcaaatgcgacgaattgcttttgtagcggttgttgtttcgacggttgcagtaattgcttctgttgtaacacttccaatgctttatagttatgtacagtctttccaaagccatttaattgttgaaattgaccattgtaaggcaaaaagtcgagatatgtggctagaaatgacagcacttcaaattggaaaaggacacgtaaaccgagttaaacgtggctggctatttggccagtgggtaccagaaaatggttacgaaccagcacaaactggtccttcaaatactgtccaatcagcaatatctcaaggcccaagtggggcaacctatggacagggagctgctggttatcaacctgttgttgctccagaacccgctccagtttgttgtacttgccatcaaggaccgcccggacctattggtcctgaaggagaacctgggccagatggggaggatggacctaatggaaaggatggaactagtggaaaagatgcacagattttgccagctcctgtggagcctccttgtattatatgcccgccaggacctgctggtcctcaaggccctgctggtgctaaaggaccacctggccctaaaggatcgcctggagagccgccaaaagacggagttcctggtgaacaaggaatggctggacaacatggtccacccggacgacccggacgagaaggacctagaggagcgcctggctctcctggtcgtctcattcccgtgcctggacctcaaggtccagccggacctccgggtgttgttggaccaccaggagcccctggagctgccggacctcctggtcaatcgtttgaaggtcctcctggacctcctggcgagcctggacgtcccggacgtgaaggccgtcctggcggacctggacctgctggacctcctggacaagacggagataagggcagttgtgaacactgtccagaaccgcgtactcctcccggatatttcgcggaggcaagtgcaaaaagtggtggatatcattaa

SEQ ID NO: 1376 - DNA, 786 bp, Meloidogyne sp.
  source 1..786: mol_type = genomic DNA
atgacggagacaatgttggattgctctgacaaggtgactgagtccaaggaagaacttgttcagcttgccaaactcgccgaacaggctgagcgttatgatgacatggcagagtcaatgaagaaggttaccgaatttggagacgaactgtctaatgaggagcgcaatcttctctcggttgcttataagaatgttgttggggctcgtcgttcttcttggcgtgttctttcgtctattgagcaaaagaccgaaggtgggaagaagacgatgactaaggaataccgtgagaagattgaatgtgaattgcgtgacattcgcaaaggtgttatgaatcttctggacaaatttcttattccgaaagctggaactcctgattctaaagtgttctaccttaagatgaagggcgactactatcgttatttggctgaggtttcttctggtgatgagttgactgatgttatcgacaaatcacaacagagttaccaagaggctttcgatattgctaaggacaaaatgccgccgactcatccaattcgtcttgggctggctctcaacttttcggtcttctactttgagattctcgacaataagagcaaggcttgtcagttggctaagcagtcttttgatgaggccgttgctgagttggacactcttgacgagaatttgtacaaggactcgactctcattatgcaacttcttcgcgacaatttgactctgtggacttctgatggcggcgttgaggaaccggagacggctccaattgttgctgatgccgaaggcacaaattaa

SEQ ID NO: 1377 - DNA, 1152 bp, Meloidogyne sp.
  source 1..1152: mol_type = genomic DNA
atgacaaaattatttattatattatttttgtgtacactttgcttgtcgagttatggaatgaaatggagatcaatccgctcccttcacagctcattctcttcatcatccgaatccaacgatctcgaagaaattcgaaatgagcaaataagggaaaatgaaaatgaaaatgaaaatgagcttagacaattaattgaacgaggatttgctgattggcaggcatacaaggaaaagcatggaaaatcatatccaaaccaggatgaggataatgaacgtatgcttgcatatttaagtgcaaaacaatttattgaaaagcatcaacgggactatacagaaggaagagttagttttcaagttggagagaatcacatggcagatgtgcctttcaaccaataccgcaagcttaatggattcaaacgccttcttggtgatgctgttacacgaaagaatgcttcttcaacatttttgcccccacttaatatgtatgcaattccagaatctgtagattggcgtgacaagggattggtgactagtgttaaaaatcagggaatgtgcggttcatgttgggcttttagcgcaaccggcgccttagaaggacagcattctcgtaaattgggaacacttgtctctctttctgaacaaaatttaattgactgcaccaaaggagagccttatgggaatatgggatgtaatggaggattaatggataatgctttccaatacattgaagacaacaagggcgttgataccgagaacagctatccatataaagctaagaacggcaaaaagtgtctttttaaacgaagcaatgttggtgctacagacactggatatgttgatctaccttctggagatgaagataaattaaagattgctgttgccacacaaggcccaatttctgtagcaattgatgccggccatcgcagttttcaactttatgctcacggggtttatgatgaggaggcttgcagtcccgataatctcggtcatggtgtcttagttgttggatatggcacagatgacatccacggagattattggcttgttaaaaatagttggggggaacattggggagaaaatgggtatattcgaatgtctcgaaacaaagacaatcaatgcgggattgcttctaaagcttcatatccacttgtttaa

SEQ ID NO: 1378 - DNA, 612 bp, Meloidogyne sp.
  source 1..612: mol_type = genomic DNA
atggttcaatacaaattacattattttgacctgcctggcagagctgaagcaattcgtatgcttttctactacaaggggcaaccttttgaagattatcgaattaaaaaggaggattggccaacaattaaatcgaactatatatttggacaagttccagtgttagaagttgatggaaaacaattagcacaagctggagttattttgcaatttttgggcaaaagatttgatttggcaggcaaaaatgaatgggaagaggcaaaagcaatggaaataatattccttaatgatgaattcggagttgctgtaggcccatatattggagcaaaatttggatttcgtgaaggaaatgtggagcaacttcgaaaagatgtttttctgccagctattgaaagatattttcctttttatgaaaaacgtttggaagagtccaattctggttttattttgccttctggattaagttttgttgacttttctgttgctcactttacgggaatgatgattgaaatggaaaaggatataatggctaaatatccgaaattagttgatttttctaatcgtttttattcgcttcctcaattgaaggaatatttgagtaagaaaaaatgttaa

SEQ ID NO: 1379 - DNA, 696 bp, Meloidogyne sp.
  source 1..696: mol_type = genomic DNA
atgtcaaataaattaattatttctattttaatattgacaattatttatactgttgtaaattctttgactgttcctgaacaaaatgccgtcgttgattgtatcaataaataccgttctcaacttgccaatggaaaaactaaaaataaaaatggggggaatttcccctctggaaaggatattttggaagtttcttatagtaaagacttagagaaatctgctcaaagatgggctaataaatgcatatttgatcataatggaacagatttatattctggaggaaaattttatggagaaaatctttatttggatggagactttgagcataaaaacataacccaattgatgattgatgcctgtaatgcatggtggggagaaagtactacagatggagtgcccccaagttggataaataactttttgcctactgataataaggagaatgatgaaaaattcgaagcggttggacactggacacaaatggcgtgggctaaaacttaccaaattggttgtgcgcttaaagtttgccacaaaccagactgtaacgggaatttgattgattgtcgttattatccaggtggaaatggtatgggttcgccgatttatcaacaaggaaaaccagcttcaggatgtggaaaagctggacctagtacgaaatatagcggactatgcaagcctgatccacaccaaaataattaa

SEQ ID NO: 1380 - DNA, 420 bp, Heterodera sp.
  source 1..420: mol_type = genomic DNA
atgccaaacattttcaaaatccttctcattgtgctctttgccgtcatctcattcagttcttcggcttccactgatggcaaaaaaactgctaatgatggcagtggaagcaactcatcagttgggattggtacgaagatcaaacgaattgtcaccgctgggctgctcttcacttccctggccacgggtggggcgcaagcaattgggcgaggcaatgctcagggagtaaatgccgccggattggtgccatcgcatgtgaccaatcgctcaatggctccaccacctcctcctgcgcaatttgaaaagggggcaactcgagtagaaaaaatgaaggcacatctacgcgaacttgctgagaaaatgccgccggtcaatgaatcgaagcgactgtcaccgagtggacccgacccacgtcatcattaa

SEQ ID NO: 1381 - DNA, 1026 bp, Heterodera sp.
  source 1..1026: mol_type = genomic DNA
atgctccaaaacggccttaccattctgcttctgatcagtgttgtgatcggccattccttggccaaccttggcccaaccatcaaacataatcctcattttaaagccgtacaaactgcgcatcatttgcatgatgccattgcgaagaagcacgaggccgaagttacgcaagtcatttgctctattagcaacgaacagcgtcaagcattggctttggagttcaaaaaacaattcggcactgatctgattgccatgctgaaaaaggagttcaaaagcgactttgaagaactgatcatttctttgatgcaaacgcccgccgtttacgatgccaaccaaatgcgtgccgcattgtccggctccaatgaggcggtgctaatcgaaattttggcgacgcgcacaaaccgacaaattacggcgccgaagcaggcgtatgagcagttggacagaaggcatcagcacaatcagctggaggaggacatcaaagcgaagacgaagaggacccttccaaaatctgttggtgtctttgctcagctgctctcgcgaagaaaaagtgcgcccgcaagcattgtattggcacacgacgaggccatgaaactgttcagagagggcgagggccgacggggcgttaacgccgtggtgttcaaccaggtgttggccactcgcagcttcgcccagcttcgggaaactttcgagttttaccgacaagccgcgcaccacgagattgaggagggaattaagcaagaattcagcggtcacaacgaagcgggtttcttggcactaatcaaatatgtccgcaacgcttctgtgttttttgcggatttgttgttcaattcgatgaaagggctcggcacacgcgactcggatttgattcgtctggtcatttctcggtctgagattgacctggctgacatcaaacacgcttttcacacgttgcacaagaagagcctggaggaggcgatcaaaggggacaccagcggagcttaccgagacgcacttttggcattggtcaagggcaacacggagcagtga

SEQ ID NO: 1382 - DNA, 1026 bp, Heterodera sp.; identical to SEQ ID NO: 1381
  source 1..1026: mol_type = genomic DNA

SEQ ID NO: 1383 - DNA, 641 bp, Heterodera sp.
  source 1..641: mol_type = genomic DNA
caagtttgagataaacttaaaaatattttatgatggaacgccgaaacagcaccaaaaatggcggtctgtcccccacccctcaagagacgaccattaatttgcccgtttcctccaatcgaagggcttcgtccgcttcgattctttttgcccaggcgagtttcgacacgggcctcgacgtgagccgcgcctcgcaattgtcgtcccagcggaatgtgctgagtacgcacgtgatggacttgggcagcttcagaccgtgcagtggcatccaatgcaaagcgttcaaatgggacaaaagccattcggaatggattcaaatcggagacacggtgaccaatgcgcaggggcgcattccgctggtgcaccccggcacttcgctgtccaaaggcctttacaaattgcgttttgccacgaaggaatattacgcacgtcaccagctgaagtcactgtttccgcaagttgacgtggtcattgaggtggacgacgccagcgaacattgccatgtgccggtgttactcaaccatttcggctactccgtttataagggacactgatggaatattccctctctcattaattctcattttggtgtatattaaaaacaaataaaataaataattaaaaaaaaaaaaaaaaaaaaaaaa

SEQ ID NO: 1384 - DNA, 369 bp, Heterodera sp.
  source 1..369: mol_type = genomic DNA
atgaatcattttgggctgacttttctgttcgtcgtcatttctctgctgctaattgcgcccggctgcgatggcatgcaaattttcgtgaagacactgacgggcaaaacgatcactttggaggtggaaagctcggacactgtggacaatgtgaaggagaagatccaagacaaggagggcattccgccggatcagcaaagattgatcttcgccggcaaacagctcgaggacgggcgaacgttggccgactacaacatccagaaggagtccacgctccacttggtcctccgtctccggggcggaaatgggaagacaaacgcgggtaagaacaacaacaacatcaagaagagaaacaagaagaacaagctctga

SEQ ID NO: 1385 - DNA, 648 bp, Heterodera sp.
  source 1..648: mol_type = genomic DNA
atggagcattttccttctaaatttgttctctgcttgctcattgcattcatcgccgttccatgctctgttttggcactttctgctggcagccgcgtgtcgatgctcgcgtgccacaacaattaccgctcacaactggccaaaggcactgcggacaacaaatcgggcaaaatgccggctggcagcaatttgatccaacaaaaatatgattcgaatattgagtcggtggcgcagaagtgggccaacggatgctcaatgtcccactcgggttcatcagggatgggcgagaatttgtacatgactagttcatcgacaatttcggaagctgatgcgctgaaacaagcttgtgacatgtggtgggcggagttgaagcagttcggctttcagtcaagtcttgtgctggacatggctcagttcaacaagggcatcggacattggagccagcaagcatgggcctccactgcacaaattggctgtgccatggcacgttgtccctcctccacctggaagacatgggttgtgtgcaactacaaggaggctggcaacttcttgaaccagccggtctacaaaaaaggtgccgcgtgcagcaagtgttcggattacaatggggcgacctgtgacagcgccagcggactgtgcaaattgccataa

SEQ ID NO: 1386 - DNA, 439 bp, Pratylenchus sp.
  source 1..439: mol_type = genomic DNA
cagccccccaaattgaggagtaccagcgcttcttcgacatgttcgacaggggcaaaaatggctacattatggccacacaaattggcacaatcatgaacgccatggagcaggactttgacgagaagacactgcgaaaattgattcgcaaattcgacgcagatggcagcggcaaaatcgaattcgacgaattctgcgccctcgtctacacggtggccaacaccgtcgacaaggacacgctgcgcaaggagttgaaggaggcgttccgcctgtttgacaaggagggcaatggctacatttcgcgccccacactgaagggcctgctccacgaaattgccccagacctcagcgacaaggacttggacgcggcggtggatgaaatcgacgaggatgggagtgggaaaatcgagttcgaggaattctgggagttgatggccggcga

SEQ ID NO: 1387 - DNA, 310 bp, Pratylenchus sp.
  source 1..310: mol_type = genomic DNA
gtgactcccagaagttgatgaccaacttcggtacgccccgtaacaccaccaccaaagtgcgtgccgaatgtctggcggatgtgcccgaagagattgcgctgaagagccatggtgaagtgcgtcttcagtcgggtaccaaccgatacgcttcccagcggggaatgaccggatttggtacgggccgtgatgtgtgcagggagggagtgcacgtgagccaggatccggccgatttggagcccctgcccgaggagaagatccgcgccagcgacggcattgtccgtctccagtcgggtacaaacaaaatcactag

SEQ ID NO: 1388 - DNA, 1026 bp, Pratylenchus sp.
  source 1..1026: mol_type = genomic DNA
atgcttctacaactcctcctttgccttttggctcttttctttcccggcttggccgccgccgaagagagtggcggctgttgtccccatgggaagttgaaagtgagcggcacccaactgttgggcagtgataatcagccggtgcaattgcgcggcatgtccctgttctggagcaatttcccagagggctccccatttttcaatgagcaaaccgtgcaatgcctcaaatgcaattggcatgccgacattgttcgagccccaatgggcgtggaggaagcgggtgggaacaaaggttatttggcagacccggcaacggaaatggccaaagaggaggccgtcattgatgcagccatcaaaaattgcatgtatgtgcttgtggattggcattacacttctgccactgcctaccccgacaaagcggaagaattttttaaaaaaatggccgccaaatgcgccggcaaatgcaattgcctctatgagacatggaatgagccaacacaagtggattggtccagcaccctgaagccatatcatgaaaaagtcattgcggcaatccgggaacaagacaaagatggggtggtcattgcgggaacacccacctgggatcaggatgtggacaaagcggcggatgacccgattaaggataagacaaatgtgatgtatacgctgcacttctacgccggcgaaggctcccacaagcagccccttcgtgacaaagccgccgcagcaatcaagaagggattgcccctgtttgtcaccgagtatgggacaacaccggccagcggagacggcacacccgacttggctgagacacaaaaatggtacgactttttggacgagaacaaagtgtcctacataaactggtcaatttcgaacaaaggcgagcaaagttccgcccttcaagagaaaactgggccagcggatgtgtgcaaagatgataaggacaccacttcgggggcattcgtcaagaaaatgttacgtgcaaagcagccagcgctgccacagggatgtgcggccccagcagcttaa

SEQ ID NO: 1389 - DNA, 477 bp, Radopholus similis
  source 1..477: mol_type = genomic DNA
atggcgcctatgtttctgcctacagtgtcagtcttcctgctgctgctggtcgtcgtacaacagtcattgcttgtgttggccagtccgaaaccgttgtttggcattggaattgggcgcacacaaagtgccggggtggagggtacactgctttgcgagggcaaaccgatggctgacgtgctagtgaagctgtatgatgatgacagaggcgttgataccgacgacctgatggcagaggggaagaccgactcgaagggacgcttctcgcttgagggatacacccacgagttcaccaccatcgacccgaaaattaatatataccacgactgcaacgacttgttgccatgccagcgcaaaatctcgataatgatcccggacaagtatatttccagtggaaaaacgccggaacgatactataatgcgggcgaggttgagctggagggcaagttcaagggagaggagcgtgactgtcttcattga

SEQ ID NO: 1390 - DNA, 1203 bp, Radopholus similis
  source 1..1203: mol_type = genomic DNA
atgttcgcccttctcgttcctgtctttcttgcactggttgcctgtgcagccaatgtgaacgcggcaaccgggagtgtggccctgggctcgatgcggcagaccatccagggtttcggcggctccagcgcgtggatgggcgcaatgacagacgctcaaatgaacacactgttcggcaatggcaacaacaaccagtacggactgagtctgctccggctgcgcatcgaccccggcaagagctgggccaacgagctgtccaatgcccagaaagccggcgccaggggtgcgcaggtgttcgccacgccgtggagcccgcccgcctcgatgaagtccaacaacaacgtggtcggcgggtcgctgaacaccgcctcgtatggcgcgtacgcggcctacctgaagagcttcgtggactacctcaaagcgggcggagtgtcgctgtacgccatctcggtgaacaacgagccggacatcaccgtcacctacgaatcgtgcgactggaccgccgcccagctggtcaacttcgtgaagaactacggctctgcggtcggcaccaagctgattgcggccgagtccttcaaattcaacaaggcactcactgacccgattctaagtgactccagcgccgtctcccaagtgtccatcatcgcgggccatatctacggttcgggccttgctgactactccagcgcgcagaacaagggcaagcaggtgtggatgacggagcactacaacgccggcttcgactggaccagtatgatggccaccgcgaaggagatccacgacgccatgacggtagccagctacaacgcatacgtgtggtggtggttcgtggacctgaacaacgagttcacgagtctgaccgacaaaagcggcaaccccaccaagcggggctacataatggcccagtggagcaagtacatccgcccggggtacacccgcgtggacgccacctaccagccgaccaccaacgtgtttctgagcgcctacaaaagcggatccaaggttgtgctggtggctgtgaacaccggctcgtcggcggtcagccaaacattctcgctcagcggcggcaccatcccggcctcgttcacgccgcacatcacttccagctccaagagtctgtccaacgaggcctcagtcagcgtgaagagcggcgcattcacctactcgctgcccggacagagcgtcaccaccttcgtctccaactga

SEQ ID NO: 1391 - DNA, 960 bp, Helicoverpa armigera
  source 1..960: mol_type = genomic DNA
atgactgaaacactgaagcttagaggaaccctctgcggccacaatggctgggttacgcaaattgcaaccaaccccaaataccctgacatgattttgtcgtcatctcgagacaagacccttatcgtgtggaagttgaccagagacgaaaccaactacggtgtaccgcagaagcgtctgtacggtcactctcacttcatttcggacgttgtgctctccagtgacggcaactacgctctgtctggctcatgggacaagaccctgcgtctgtgggatcttgccgccggaaagaccaccaggcgtttcgaagaccatactaaggatgtactctccgtggcattctcagtggacaaccgtcagattgtatctggatctcgggacaagaccatcaagctgtggaacacacttgctgagtgcaagtacacaatccaggatgatggccacagtgactgggtgtcctgcgtccgcttctcaccccaatcacgccaacccatcattgtgtctgctggttgggaccgcaccgttaaggtctggcatcttaccaactgcaagttgaagatcaaccaccttggtcactctggttacctgaacacagtcactgtctctcctgatggttctctgtgcgcttccggtggcaaggacatgaaggccatgctctgggacttgaatgatggcaagcatctgcacaccctggaccacaatgacatcatcacatcattgtgcttctcacccaacagatactggctgtgcgctgccttcggaccttccatcaagatctgggatctagaaagcaaggagatggttgaagagctcaggcctgaaatcatcaaccagacccagacatccaagtctgacccaccccagtgcctgtccctggcctggtccacagacggtcagaccctcttcgccggttactccgacaacatcatcagagtctggcaggtgtccgtctcggcacgataa

SEQ ID NO: 1392 - DNA, 999 bp, Helicoverpa armigera
  source 1..999: mol_type = genomic DNA
atgtccaaaatcggtatcaacggtttcggccgcattggccgtctggtcctccgtgccgccgtcgagaagggcgcccaggtcgttgccatcaacgaccccttcatcggcttggactacatggtctacctcttcaagtacgactccacccacggtcgcttcaagggctccgttgacatccaagatggccaccttgtcgtcaatggaaacaaaatcgccgtcttctccgagagggaccccaaggccatcccatggggcaaggctggcgccgaatacgtcgttgaatccactggtgttttcacgaccacagagaaggcctctgctcatttagagggtggtgctaagaaggtcatcatctccgctcccagcgctgacgcacccatgttcgtcgttggtgtcaaccttgaagcgtatgacccctcttacaaggtcatctccaacgcttcctgcacaaccaactgcctcgctcctttggctaaggtcatccatgacaacttcgagatcattgaaggtctgatgaccactgtgcacgccaccactgccacccagaagacagtggatggaccctctggcaaactgtggcgtgatggccgtggtgcccagcagaacatcattcccgcctccaccggtgctgccaaggccgtcggcaaggtcattcccgctctgaacggaaagctgactggtatggctttccgtgtccccgtcccgaacgtgtctgtcgttgacttgactgttcgtcttggcaagcccgccacctacgatgccatcaaacagaaggtcaaggaggccgctcaaggtcctctgaagggcatcctcgactacactgaggagcaggtcgtgtcatccgacttcatcggtgactctcactcgtccatcttcgatgccgctgccggtatctctctgaacgacaacttcgtgaagctcatcagctggtacgacaacgagttcggctactccaaccgtgtcatcgatctcatcaagtacatccagaccaaggattaa

SEQ ID NO: 1393 - DNA, 1767 bp, Helicoverpa armigera
  source 1..1767: mol_type = genomic DNA
atgagagtgatactagcgacgttggccgtcctggcggtcgcaacgactgcaattgaagcggacagcaaagcgcgcatagtatgctacttcagcaactgggcggtgtaccggcccggcgtgggtcgctacggcatcgaggacatccccgtggacctctgcacgcacatcatctactccttcatcggcgtcactgagaagagcaatgaagttctcatcattgatcctgagctggacgtagacaagaacggtttcaggaacttcacagctcttcggaagtcgcaccctaacgtgaagttcacagtggctgtgggtggctgggccgagggtggctctaaatactcgcacatggttgcgcagaaacaaaccagaatggctttcgttaggagcgttgtagacttcctgaagaaatacgactttgatggtttggacttggattgggagtaccctggtgctgctgaccgtggtggctccttctcagacaaggatcggttcctcttcctcgtccaggagttgaggagagccttcatcagggagaagaggggatgggaactgactgctgctgtgcctctcgctaacttcagactgatggaaggataccacgtaccggatctttgccaagagctggatgctatccacgtgatgtcgtacgatttgcgcggcaactgggccggctttgcagatgtgcactcacctttatataagcgtcctcatgatcaatgggcttatgagaaattgaatgtgaatgatggcttagcgctctgggaagagaagggctgtcccagcaacaagctcgtcgtcggcattccgttctacggtcgctcattcactctgtcagctggtaacaacaactacggacttggtacttacatcaacaaggaggctggaggtggcgatcctgctccgtacaccaatgctactggattctgggcttattatgagatctgtaccgaagtcgacaaagaaggctcgggctggaccaagaaatgggacgacgccggcaaatgtccctacgcctacaagggcacccagtgggtcggctatgaagaccctcgcagtgtcgagatcaagatgaactggatcaaggagaagggctacctgggtgccatgacctgggccattgacatggatgacttcaaggggctctgtggagacgaaaatcctctgattaagctcctgcataagcatatgagcacttatactgtcccaccacctcgttctggaaatactactcctacgcctgaatgggcgcggccgccgtcaacaacgtccgacccggctgagggggagatcgtcactactgtcaagcccacgactgcgaagccagctacgacgaaaccaactacggccaagccaacgacggccaagcctacgacagccaagccaacaacggccaagcctacgaccaccaaggctcctcaagtcgtaacaatccctgacgatgagaatgacatcgctgtgagacctgaacctccgaaaaaacctgtaactccagaaacccctgtggtacctgaagttcctgaatctgctgaaacaccaactgaaaatgaaatagataaccacgacgtctgcaattctgaagaggattacgtgcctgacaagaaaaagtgcgataagtactggcgatgcgtcaacggacaaggaatgctgttcacatgccaaccaggaactgtgttcaacgtgaagctgaatgtttgcgactggcccgacaatgccgaccgtaagcgactgcgagccctaaactgccggctcatgaacaggacgccttag

SEQ ID NO: 1394 - DNA, 642 bp, Anticarsia gemmatalis
  source 1..642: mol_type = genomic DNA
ttggaaggtggtgccaagaaggtcatcatctccgctcccagcgcagacgcacccatgttcgtcgtaggtgtcaaccttgacgcctacgacccctctttcaaggtcatctccaacgcttcctgcaccaccaactgccttgctcccctcgccaaggtcattcatgacaacttcgagattattgagggtctgatgaccactgtgcatgccaccaccgccacccagaagactgttgatggaccctccggcaagctgtggcgtgatggccgtggtgctcaacagaatatcattcccgcttccactggagccgctaaggctgtcggcaaagtcattcctgctctgaatggaaagctgaccggtatggccttccgtgtcccggtcgctaacgtatccgttgtcgacctcactgtccgtcttggcaagcccgcttcctacgatgccatcaagcagaaggttaaggaggctgcccagggccctcttaagggtatcctcgactacaccgaggaacaggttgtatcatccgacttcatcggtgatgcgcactcctccatctttgatgccgccgctggtatctctctaaacgacaacttcgtcaagcttatcagctggtacgacaacgagtacggatactccaaccgcgtgatc

SEQ ID NO: 1395 - DNA, 1668 bp, Spodoptera frugiperda
  source 1..1668: mol_type = genomic DNA
atgagagcgatactggcgacgttgcccgtcctggcggtcgtaacgactgcaattgaagcggacagcaaagcgcgcatagtatgctacttcagcaactgggcggtgtatcgacctggcgtgggtcgctacggcatcgaggacatccctgtggacctctgcactcatatcatctactcttttattggagtcactgaaaagtccaatgaagttcttattattgaccctgagttggacgtagacaagaatggcttcagcaacttcacagctcttcgcaagtcgcaccctgacgtcaagttcaccgtggctgtcggtggctgggctgaaggaggatccaaatactcccacatggtcgcacagaaacaaacgcgagtggcatttgttaggagcgttgttgatttcttgaaaaaatacgacttcgatggtttggacctggactgggagtaccctggtgctgctgaccgtggtggttccttctccgacaaggatcggttcctcttcctcgtccaggagctcaggagagcattcatcagggagaagagaggctgggaactgactgctgctgtgccactcgccaactttaggctgatggaaggttaccacgtacctgatctttgccaggagctggatgctatacatgtgatgtcgtacgacctgagaggaaactgggctggattcgctgatgtgcactcgccgttgtacaagcgtccccatgaccagtgggcttatgagaaactgaatgttaacgatggtttagctctctgggaagaaaagggctgtcccagtaacaagttggtggtcggtatcccgttctacggccgttcgttcactctgtcagctggtaacaacaactacggcctcggcacttacatcaacaaggaggctggaggtggtgacccagctccttacaccaacgctactggattctgggcttactacgagatctgtaccgaagtcgacaaagaaggttcaggatggactaagaagtgggacgagcatggcaagtgcccctacgcctacaagggaacccagtgggtcggttacgaagacccccgcggtgtggagatcaagatgaactggatcaaggagaagggatacctcggtgctatgacctgggctattgacatggatgacttcaaaggtctttgcggtgatgagaatcctcttatcaagctcctccacaaacatatgagcacctacaccgtcccaccaccacgctctggaaataccactcctacgcctgaatgggcgcgcccgccgtcgacgacgtccggcccgtcggagggagagccaatcgtgacgactgcaaggccgaccacgaccactaagcggcctatgaagcagacgaccacttcaaagcctcaagtcgttattgaagatgatgaatttgatattgccgtgagacctgaaccacctaaggcacctgagacaccagtggtccccgaatcccctgaagccccagaatcccctgctgagaatgagatcgacgaccatgatgtctgcaactctgaagaagattatgtcccagataagaagaaatgcaccaagtactggcgctgcgtcaacggaaagggaatgcagttcacctgccacccaggaacaatgttcaacacgcaactgaacgtttgcgattggcccgacaacgctaaacgtcaagactgcgagccctag

SEQ ID NO: 1396 - DNA, 411 bp, Spodoptera frugiperda
  source 1..411: mol_type = genomic DNA
atgaaactcctaatcctctccgtatgcgtggcgctggtggctgcggacgtgtcccacatcctgcccaaagacgagaagtccgcacagatcctgaagcaggaactggatgtcggagtagagggatcgtaccagtacgcgtacgaaacagacaacggcatcgcggctaacgaggccggatctctgaagcagatcagccctgaacaaacagctgaagtagtccagggtcaagccagctggcaatcgcccgaaggagagcagatcaaattcgagtacattgccgatgagaatggttaccagccacagggctcccacctgccaacttcccccccgattcctgaggccatcatccgtgccttggagtacatcagggctcaccccccaccccagagaagaactaaattaaaatactaa

SEQ ID NO: 1397 - DNA, 1257 bp, Chrysodeixis includens
  source 1..1257: mol_type = genomic DNA
atgggtgatcatttgccagcttgtgtcatcgatgtcggcacggggtataccaagctgggctttgccggcaacaaggaaccgcagtttatcattccgtcagccatagcgataaaagaaactgcgaaagtcggtgaccaaagcactcggcgtatgactaaggccgtcgaggatttagatttcttcatcggggatgaagcatttgacgccaccgggtactctgtgaagtatcctgtacgccatgggcttgttgaagattgggatctaatggagcgctacatcgaacagtgtatcttcaaatatctaagggcggagccggaagatcaccatttcctactcactgagcctccactaaacactcctgagaacagggagtacttagctgagattatgtttgagtcattcaatgtacctggtttgtacattgctgttcaggcagtgttggccctcgctgcgtcgtggaagtcgcgtacgtcagctgagcgcacattcacaggcattgtggtagacagtggagatggtgtgacccacatagtgcctgttgctgaaggatatgtcataggatcatgtatcaagcatatacctattgcaggaagaaacattacctcatttatccagtctctacttcgtgagcgtgaagtaggtatcccaccagaacagagcttggagactgctaaggctatcaaggagcgatacagttacatttgccctgacattgctaaagagtttgcaaaatatgatgcagaccccggcaaatggatgaaaaaatacacaggaatcaatgctattactaagaatcccttctcagtagatgttggatatgagaggttcttgggacctgagatattcttccacccagagttttccaatgctgatttcactgttcccctgaatgagatggttgatgaagtcatccagtcatgtcccattgatgtaaggagaggcttatatgggaacattgtgctgtccggtggatcaacgatgttccgtgactttggaaggaggttgcagagggatatcaagaggactgtggatgctagactgaagctttctaccactctgtcagagggccgcatcactcctaagcctgttgatgtccaggtgatctcgcacaacatgcagcggtatgctgtgtggtttggtggcagtatgctcggctccaccccagagttttatcaagtgtgtcacacaaaacaggcatacatggagtatggccccagtatttgcagacacaaccctgtatttggcaccatgacataa

SEQ ID NO: 1398 - DNA, 999 bp, Chrysodeixis includens
  source 1..999: mol_type = genomic DNA
atgtccaaaatcggaatcaacggtttcggccgcattggtcgcctggtgctccgtgccgccgtcgagaagggagctcaggtcgtcgctatcaacgaccccttcatcggccttgactacatggtctacctcttcaagtacgactcaacccacggacgcttcaagggcaccgttgagattaaggatggattcctcgtcgtaaacggcaacaaaatcgcagtctactgcgagagggaccctaaggccatcccatggggcaaggccggcgctgaatacatcgtagaatccactggtgtgttcacaaccacagagaaggcctctgctcacttggagggtggtgccaagaaagtcatcatctctgcccccagcgccgacgcacccatgttcgtcgttggagtcaaccttgaagcctacgacccctcttacaaggtcatctccaacgcatcttgcacaaccaactgccttgcacctctcgctaaagtcatccacgacaacttcgagattgttgaaggtttgatgaccaccgtgcacgccaccaccgccacccagaagaccgtcgacggaccttccggaaagctgtggcgtgatggccgtggtgcccaacagaatatcattcccgccgctactggtgccgctaaggccgtcggcaaagtcattcccgctttgaacggaaaactgaccggtatggctttccgtgtgcccgtcgccaacgtgtccgtcgtggacctcactgtccgcctagccaagcccgccagctatgacgccatcaaacaaaaggtcaaggaggccgccgccggccctctcaagggaatccttgactacaccgaggagcaggtcgtatcctcagactttatcggtgactgccactcttcaatcttcgacgctgccgctggtatctctctcaacgacaacttcgtcaagctcatcagctggtacgacaacgagttcggctactccaaccgcgtcatcgatctcatcaagtacatccagaccaaggattaa

SEQ ID NO: 1399 - DNA, 1242 bp, Diabrotica virgifera
  source 1..1242: mol_type = genomic DNA
atgttttattattacgttttgcaggaaaactttgtattactactgaaagattttagcgaggcttataaaccaaaaggtcttttggtaacagcagctcttgcaggagcagtagataaaattaatgctgcttatgatgttgacgaaatcacaaaatatttggatatgttaaaccttatgacttatgattatcatggtgctttcgacaattttataggacatatttctcctctgcatgcttcatctttagattacaaacatggaaggaactcaacctacattgttgctactggtcttgaatattggttatccctgaatgtcgatccggctaaaataaatatgggtgttcccacttacggtagaacgttcactcttctggaccaggatcacacttcactttatgatcctgttgctggacccggaaagaagggagaatacacaggattgaaaggttctttggggtatcatgaggtttgtatcaataaactaagtcctttagtatcaattgacgatatcagcgatgacactgccataacaacagagaatctagaagacctacacaccctgttgaacgctttaaacaacgaattcgctaaaaagtataatataataaaatactttgtgttccttaatattttaaaatattttagatatttggatatgttaaaccttatgacttatgattatcatggtgctttcgacaattttataggacatatttctcctctgcatgcttcatctttagattacaaacatggaaggaactcaacctacattgttgctactggtcttgaatattggttatccctgaatgtcgatccagctaaaataaatatgggtgttcccacttacggtagaacgttcactcttctggaccaggatcacacttcactttatgatcctgttgctggacccggaaagaagggagaatacacaggattgaaaggttctttggggtatcatgagatctgcgaattcttctctggttctgattccacttactattgggacgatgaacaaaaagtacctcacagaatttataacgatcagtggattggttatgatgacgaaaggtcaatggcgaaaaaaattgactttgccgtagagcgtggcgtcggtggcattatggtttggaccttggacacagatgactttaccggaatatgtggaaaaaaatacatattgcttaatactattaaaaacagattggagtatcatgaaaaacaaaagaatggaaaaaaataa

SEQ ID NO: 1400 - DNA, 1335 bp, Diabrotica virgifera
  source 1..1335: mol_type = genomic DNA
atgttttcggcttgtgtttctgtggtactgtttctatttttcaacaactggatgtgtgatgcttctacaggtccaacccacggaaagcttgtagtgtgttatgtgggcagttgggcagtttatagaccagataggggatctttcaccattgaacatctagatccaagtctctgcacacacataatatattcgtttagtggattagatattacacaagattcgttaagatcattagatgcatttcaagatttaacggatgattatggaagaggaggttttaagagagtgactggtctaaaacacaaatacccccacctcaaagtaacgttagctgtaggaggatggaacgaaggttctgcaaattactcaaaacttgtagctgatcctcacagacgaagcagattcgttgcaaactcattagattttattaagaagtataattttgatgggcttgacctggattgggagtttcccggtaagagaggcggaagtaaagaagacaaaaacaatttcctcctgcttgttaaggaattaagagcagcttatagaaaggacaagctgctccttacagctgcttttggtgctggaaaagatactatagatgtcgcttatgacgttgaggcgttgtcagtatatttggattatattcacatgatgtgctacgattatcatggcgcatgggacaaaagaaccggggcaaactcacctttgaaaggaccagatgttctaaatgtggaatatactattaactacatgttaagtttgggagctcctgcaaataagctagtgctgggaatacctgtatatggcagaacttttcttctggaggaacctcttcagagtagaagaaaaccaagactaggttcagttgcttcaaaccttggattcgcaggtccttacactagggaaggaggatttttgggttataatgagatctgcaaagaactgaagaatacaacgtcagactggaaaatctactgggacgatgaatcccgcactccatttgcagtatccgagaacaaagtaatatcttacgacaacgaacaatccatagccgaaaaagttcattttgccatggaaaaagacttggctggaaccatggtttggtccgtcgatactgatgattttcatggggattgctcggaagaagacaacgaggactttgtcaattttcctattatgaggtgtattaataagtcgatagtgaagagccttaatgatttgaagaataccattagacatgatagaaaaaataaagatggtggaagtgataaagttagagttagtttgttaggattagtcgttgttttagtctctacctattttataatctag

SEQ ID NO: 1401 - DNA, 1002 bp, Diabrotica virgifera
  source 1..1002: mol_type = genomic DNA
atggtgaaaattggaattaacggttttggccgtattggtcgtcttgtactccgtgcagctcttgaaaaaggagttgaagtagtagctgtcaacgatcccttccttgatgtcgactacatggtatacttgttcaaatttgactctacccacggtcgctacaagggatgtgtcaacagtgatggcaaaaacttagttgttgatggcaaagtcatttccgtacaccaagaaagagacccagctgctattccatggggcaaagctggtgcagattatgtagtagaatctaccggagtgttcaccacaattgaaaaggccaagaaacatcttgacggtggtgctaagaaagtcatcatctcagctccatctgctgatgctccaatgtatgtatgtggtgttaacttggatgcctacaatccagctgatcccgtaatctctaacgcttcttgcactaccaactgccttgctccactcgccaaagtcatccacgacaacttcgaaatcgttgaaggtttgatgaccaccgtacatgccacaaccgccacacaaaaaactgtcgacggaccctctggaaaattgtggcgtgacggtcgtggtgccggacaaaacatcatcccagcttccactggtgccgccaaggctgttggcaaggttattccaagccttaatggcaaactcacaggtatggctttccgtgtacctgtaccaaatgtatccgttgttgacttgactgttcgtttgggcaaacccgccagctacgaccaaattaaggccaaggttaaggaagccgcagaaggtcctcttaagggaatcttgggatacaccgacgaagaagtagtctcaaacgacttcgttggagacacccactcctctgtctttgatgctaaagctggtatccaacttaacgacaaattcgtcaaacttatctcatggtacgataatgagtacggttattccaacagagtagtcgatcttatcacctacatcgacaccaagaaagcttaa

SEQ ID NO: 1402 - DNA, 840 bp, Leptinotarsa decemlineata
  source 1..840: mol_type = genomic DNA
atgagtttagcagagatctgtggaatgcaagatttagattcatttaggacgaacttctgtcccaacgagttggatagaatgtgcaccaatttcgaaaataatctgaatctggaaatgcctccttttgcaaatccagcagcaaaggtatcacaattaacgagagatgaaagcggtcgagaaataaaaatggcttttgatcatggtaccacaactctgggtttcatgtataaaggtggtgttgttcttgctgtagactccagagctacaggcggacaatttattgggtcgcaaaccatgaaaaaaattgtggaaatcaatgatttcttattgggaacattggctggaggtgcggcagactgtgtttattgggaccgtgtactggccaaacaatgtagaatgtatgaattaaggaacagggagcgtatttctgtagcagctgcttccaaattgatggcaaacatggtatacaattacaagggaatgggactgtcaatgggaatgatgttagcaggatgggataaaagaggtccacacctgtactatgtagactccgagggtaccagaacacctggaaaagtctttagtgtgggttcaggttcaatttatgcatttggtgtcttggattccggatacaaatgggatttgacggatgaggaggcttacgatttgggtcgcagggcgatttaccatgccacacacagagatgcctactctggaggtatcgtgagggtttatcacatgaaggagactggttggatacatattgataacaatgattgtaatgatttacattataagtaccaggctgagaaggaagatttggaaaatacaattgcttaa

SEQ ID NO: 1403 - DNA, 4248 bp, Bemisia tabaci
  source 1..4248: mol_type = genomic DNA
atgagactgatgggaaacatgagggagcgagtgattaaacaaactagtcaacttgcactattagttttgaattttttagcgtgcgctctggcaagcgaaccttgcaacgtattcctcgagcccaatgcaacttcgagcaagttgtccgcgctttgcaaactcccaacgatcccccgggagttgattctgccggagagcgataatgtgatcaaactcagattggagtgcaaccaggatatccacgccgaaagtttcatctacctgagcctcctctcgcatttcaaccaaatcgaagagttcaacctcaccaactgcaaagtcgccgagatatccgagaatgtgttcagccagagccctggcctcaaaaagctcaccgtcaactctcgaaacttcgactggtcaccgacgaaatccctgaggatcaagagcaggagtttccgacctttgaaggagctccatcacctggacctgagtttcaataacatggactcgctgccggacggcgtgttttgcccgttgaaaaagctgcagcatttgaatttatccaacaacgccatcgcagatataacaaggctgggactctcggcgaagaaatgggcccctcctcgcgtgtcgagcccgcgacccacgacatcggagggcgacacggacggggagggcaccaccgagtgccatggcggcagtgaacttcgaactttagacctctcggccaaccgcatccaaagcctcgccgagctttccgacgtttcgaaattcaagcggctccacaccctccttttgaacgacaatcttatcaccgagatcccgaaaaacgccttctcaagccttcacaacgtgcatatccttaacctcacaaacaacaacatccaaactttgacggagaacgtgttcaccaactgcaaagagcttcaggaaatccatttgcagaataattctctggcgcaactgccgaaggggctgttgaatcatttaaacaagcttttaatactcgacttatcatcgaatcaactgacttccaatcaaatagacgagtccacgttcgtcggccttatcaggctcattgtcctgaatctctccagcaacaggctgacgcgcatcaactccaaaacgttcaaggacttgcttttccttcagatcttggatttacacaacaactcgatcggtttcatcgaaaacgactcgttcctgccgttgtacaacttgcacactttgaacttgagcaataatcgtctgcaccacgtgacctccaatctgctcaacgggttgttcgttctcaccaagttgaacttgaacaataatttaatcacgaccgtcgatgagatcgccttcaggaactgttccgatctgaaagagcttgacctcagctcgaacgccatctctgagcttccaacggcgctaaccgacctgtccttcctgaagtctctcgatctgggcgagaatcagatctcggagattaaaccgaactcttttaaaaatatggcccaattgacggggcttcggctgatagacaacagcataggaaacttgacgaaagacatgttcgtcgacttgcccaatctccaagttctgaacttggccaagaataaagtgcaatcgatcgagcgcgggactttcgacaagaacgtccagatcgaagccatccggttggactataattacttgcaagacatcaacggcgtgttttctagcctcgtgtcattgctatggctgaatctgtctgataatcatttagtttggttcgattacgcgttcctgccgacgaatctgaagtggcttgatatccacaacaactacatcgagaaattgggtaactattacaaaattatgaacgaactccaattgaaaacccttgatgctagttacaacaggatcgtcgagttgaacgagctgtccataccgaacagcgtcgagataatgtttgtgaacaacaacatgatcaggaaaatcgaaacaaacacgtttttcgacaagaaaaatctggcgcgtgtggatatttacgccaatgagctgtcgcgactggagttgaattcattgcgcctggataaactatccgaagaccggaacatccctgaattttacatagccggcaaccccttcgtgtgtgactgcaacatggactggctcccggcgatcaacaacatgacgcacctgcgccagtacccgaaaatcatggacttgagtaacatcgtgtgccaaatgacaacttcacgcggtacgcaaaacttgcaaatgtccacgagcatgaagacaaacgagtttctgtgcaggtacgagacccattgtttcgccctgtgccactgctgtgacttcgacgcctgcgattgcgagatgacgtgtccttccaactgcacttgctaccacgaccaaacctggaacacgaatctggtcgattgctccaaccagaatttgaaccatatctctgataaaatttccatgtacgcatcccatgtctatttggacggcaacaatttcgcggagctttccaaccacctgttcattggccgtaaaaacctcaaagtgctgtttttcaacaacagcaacatccaaaccatccggaacaacactttcaacggtctaagcacgctgcaaacgctccacttggagcacaactccctcgtcacactttacggcaacgaatttgaaaatctttacaatctgaaggaattatacctgaacaacaacaagttagcttacatcaacaacatcaccttccaaaacttgcgctcgttagaactgttgaagctgcacgataatcagctgatgcatttcaacttcgtgctcttgaatttctacaacagtcacctgataaaagtctccctccacgataacccgtggtcgtgcgattgcactcatctccaggacctggccacttacatctcgaataactacaaccaaatcgagaacgtgaacgccatcaactgctactacaacaacagcagcaacaacctggtcaaaaacatcatcaactggaacaacacagcgtgcatcgacttcccggccagctccatcatccgcaacatcatcgtctcggattatttcatcgtcgtcgtctcgtcgctcatcctcctcttcctcgtgctcgcgatcctcttcgtcctcttccgcgactccttcaagtactggctcttcaacaactacaacatcaaaatcttcaagttcaaacactacaacagcggtcaaatgaccaacaagtactatctggaggaccgggacaaactttacgacgcctacgtcgtgtacagcgccctggacgaaaacgaattcgtcctgcggagcgtgtgcaacgagctggaaccgacgtaccagatctgcctgcactaccgggacctgccggccatcaacacggcctcctccccgtacctgcagaacagcctgacgtcggtcatcatagaggcggccgaggccagcaagcgaatcatcctcgtcgccaccaagaacttcctccagaacgagtggctcaagttagagttcaagaacgcgctcctggagtgcctcaaagggcgcatcttcaagctcatcatcatcgaggacgccaactccaacctcaacaacgtagacaacgactttagactgtatttcaagagctgcaccaggctcaagtacaacgagaagaagttctgggacaagctcaagtactcgatgcccaataacaatcatagcggcacgcggcataccaagaaagcgtgcaataactacaacaggaagaacataaacaattatacgatagagtcgacgacgaacagcgtggccagcaaccactcgcggcggcatcagcactacatcaacgataagaaccaccagcagcagttgcatcatcaccagcatcaccaccagcagcacccgctggcggcgcacccgctcttccggccggtgatcggcaacggggacctggtgccggtggtaccgatgcccgtgccggtggtacccgtctacggcgggagcgagatggtcgccatgccgaattcgaggcactcggtcgacaagtcgcactcggcccggcagctctcgggcgactcgtcggcggactactcttcggcgacgacggccaccccctcgccacggcccagctccgaccatatctactcgtccatcgacacgcccgagtacccgagcttcgatcgcacgcccgcgcgcaaccagtcgtggcgggccgcccccgcgccttccgccccggccgccgccgccgccgcgacgcctggcgtcggcgtcgactccgccggacacccggtccaggcctacctagtctga

SEQ ID NO: 1404 - DNA, 777 bp, Myzus persicae
  source 1..777: mol_type = genomic DNA
atgggaagttacaaattgtacctggccgtcatggcaatagctgtcatagctgcagttcaggaaattagttgcaaggttcagacttccgaacaggacgatgatcaggaaggatattacgatgatgagggaggagtgaacgataatcagggagaagagaacgataatcagggagaagagaacgataatcagggagaagagaacgataatcagggagaagagaaggaagaagtttccgaaccagagatggagcaccatcagtgcgaagaatacaaatcgaagatctggaacgatgcatttagcaacccgaaggctatgaacctgatgaaactgacgtttaatacagctaaggaattgggctccaacgaagtgtgctcggacacgacccgggccttatttaacttcgtcgatgtgatggccaccagcccgtacgcccacttctcgctaggtatgtttaacaagatggtggcgtttattttgagggaggtggacacgacatcggacaaatttaaagagacgaagcaggtggtcgaccgtatctcgaaaactccagagatccgtgactatatcaggaactcggccgccaagaccgtcgacttgctcaaggaacccaagattagagcacgactgttcagagtgatgaaagccttcgagagtctgataaaaccaaacgaaaacgaagcattaatcaaacagaagattaaggggttaaccaatgctcccgtcaagttagccaagggtgccatgaaaacggttggacgtttctttagacatttttaa

SEQ ID NO: 1405 - DNA, 408 bp, Myzus persicae
  source 1..408: mol_type = genomic DNA
atgcaggtcacatttgtcgtatcgtcattgctgttagctgccgtcgcagtcagcgcctaccccgctggacagagcccggaatccagagccgtcatcttggtccaagattcagcacccagcgccgacggatcattgaagaacaacttccaaaccgataacggaatcaaacaagaagaagtcaggtacttgaaggctggcccagaaggacccgtttcagttgtccaaggagcagtgtcttacgtggccccagacggccagaccatccaaaccggctacgtcgccgacgagaacggttaccagccgtacggcgctcacttgcccactccaccagcaatcccattcgagatccaagagtcactcagatacctcgcttctctgcccagcactcctgaaccaaaataccagtaa

SEQ ID NO: 1406 - DNA, 999 bp, Myzus persicae
  source 1..999: mol_type = genomic DNA
atgtcgaacattggtatcaatggatttggccgtattggccgattggtgttgagagcttcattggaaaaaggtgccaaagttgtagccatcaacgatccgttcattggcattgaatacatggtatacttgttcaaatacgattccactcacggacgtttcaaaggtgaagtttctgttgatggagacgttcttattgtcaatggaaacaagatcaaagtgttatctgagcgcgacccaaaggccatccaatggggatcagctggtgctgattacgtagtagaatccactggtgtctttaccaccattgaaaaagcctctgctcacttagaaggcggagccaagaaagttatcatctctgccccaagtgctgatgcaccaatgtttgttgttggtgttaacttggatgcatacaatccatcattcaaagttgtatctaatgcttcatgcacaactaactgcttggctccattagccaaggttattcatgacaactttggaattgttgaaggtcttatgactactgttcacgctaccaccgccacccaaaaaactgttgacggaccatctggaaaattatggagagatggcagaggtgctgcccaaaacatcattcctgcatctactggagcagccaaggctgttagtaaggtcatcccagaacttaatggaaaattaactggaatggctttcagagtaccagttgctaatgtttctgttgttgacttgactgtaagacttgcaaaaccagcatcttacgaagatatcaaaaacaaagtcaaggaagccgctgaaggaccattgaagggaattttgggttacactgaagatgaagttgtgtcttccgacttcattggtgatacccactcatcgatctttgacgccaaggcgggaatttcattgaacgaccaattcgtcaaacttatctcatggtacgataatgaatatggttactccaaccgtgttgtggacttgatcaagtacatgcaatccaaggattaa

SEQ ID NO: 1407 - DNA, 2221 bp, Myzus persicae
  source 1..2221: mol_type = genomic DNA
tttttggatatcaattaactaaatgataaaaatcgttcaaaaatgacttcgttaaacacttttgaggatgaagaacaggaaagttcatatgggtttgtctttgctgtgtctggaccagtcgttacggctgaaaagatgtctggttcagctatgtacgaactggttcgtgtaggatactttcagctggttggtgaaattattcgtttagaaggtgacatggctacaatccaggtttatgaagatacatctggtgttactgttggtgacccggtttcaaggactggaaaaccactttctgtagaattaggccctggcattttgggaagtatatttgatggtattcaacgaccattaaaagacattaatgagctcacccaaaacatctatattcccaagggtgttaatatacctgctttaggtcgtaatgtgtcatgggattataactcatctaatataaagatcggaagccatataactggtggagacctctttggtcttgtccatgaaaatactcttgttaaacataagttaatgttgccacctaaagctaagggaaccgttgttttccaagctccaccgggaaactataaagttgatgatattatattggaaacagaatttgatggagaaaaatcatcgttcactatgttgcaagtttggcccgtacgtcagccacgcccagtcactgaaaaattgcctgccaactatccacttctaacaggacaacgagtacttgactctctatttccttgtgtacaaggtggaacaacagctattcctggagcttttggttgtggtaaaactgtaatatctcaagctttatcaaagtattcaaattctgatgttattgtgtatgttggttgtggagaacgtggtaatgaaatggctgaggtattgggagatttcccagaactgtcgattgaagttgatggtgtaactgaatctatcatgaagagaactgcattagttgcaaatacttctaacatgcctgtagctgctcgagaagcttcaatttatactggtattactttatctgagtacttcagagatatgggatataatgtatctatgatggccgattcaacttctcgttgggctgaagctttgcgtgaaatttctggtcgtcttgctgaaatgcctgctgatagtggttatcctgcatacttgggtgctcgcttggcttccttctacgaaagagctggcagagtaaaatgtctaggtaaccctgaacgggaaggttcagttagtattgttggagctgtcagtcctccaggtggtgacttctctgatccagttacatcagctacattaggtattgtgcaagtgttttggggtttggataagaaattggctcaacgtaaacactttccttccattaattggcttatttcatacagtaagtatacaagagctttggatgacttctatgacaaaaacttccctgaatttgtgcctctaagaaccaaggttaaggagattttacaagaagaagaagatttatctgaaatagtacagttggtcggtaaagcatcactagctgaatccgacaaaattacattagaagttgctaaactattaaaagatgactttttacaacaaaacagttattcgtcatatgatcgtttttgtccattttacaaaactgttggaatgttacgaaatactattgccttttatgacatggcacgtcatgccgttgagtcaacagcccaatctgaaaataagataacttggtctgtaatcagggacagtatgggcaatatcctataccagttatcgtccatgaagttcaaggacccggttaaagatggcgaagctaaaatccgtgctgactttgatcagttatatgatgatatccagcaagcttttaggaatctggaggattaaaagtatttttcacgttaatacatcgttattcaaaaacaaaacaaaagtttgtaaaaaaaaaaaatatatattataatgaattgttgttgtttactccagcttaagtaaaattagcgcacatcatagaatgaaactgtggtgacggatgtaagattctttttgtttttaaacttgttgtttatgtgtgtcaccatcaaaattttttttattattattattatttcattttattcgtcattccattcttgtagatttctttcacattaagtgaagtattattttataatttaattttaattcgacaataatcaaccataccatgtgaattttataa

SEQ ID NO: 1408 - DNA, 2154 bp, Nephotettix cincticeps
  source 1..2154: mol_type = genomic DNA
atgaagaggctaataattttggtcctggcagtgctggtgacagcgtctgacctcaggttgggagaccgcatcgtctccacggagaaggagtgccagcgtatctatgatctcaacaagaattggagcgtcaattattacaacgaacaggcggcacagtacatagacctgtacttcatatgtatcgacagcctcaacgaagacaagtacaagtatattgacgaagacaaagtggacatgacctggtacccgggtgacgaggacaagttgccggtgaagacaagagagggcgttcagttcgtctccaagccacctcccaggaagccggaggaagcggagtccatgaagaagaagattgctgattatctcaagaagaccggtgggacgatcaatcccatttataaactcatgaacttgcagagcggaaagggacaggatatcgtggacaaacaagttgaatgcgaaactctagcgttgaacttcctcaaaaacaaagacgacaaagatggcgagatactacacaaggaatgtatcaaccagctatactgtttgaaagaaaggttcatgaatgaaaatatgtacactagagagcattatccagacttctttccgatcctgtacaaaaatagaggaaccatgataaaaagcccaccgaaaatggatcaatcaccttgtgagacatctgttccacaagaggaaagtgaaggtgagctcgaaaaatggatgagaggagtcgaatacttaggtcaaaaactaactgacgcaggtcaagctggttcggactttattcagcatttgatacacaaaggaactactgctggcgacaaaatactgtctaaaaatgaactagatgacctaatgactgatgttcaatctgttgaggtggtagacgatgacaaggaaaaggataacgacaacgaaaaactctacaaggtttacggaaacatgatgatggataaattggccgatttagaatctaaaggaatcaacgttgcttatactcagctggacaaggcaaaaccggtgattgataaggtccaaaaaacagcatccattacagcaggaaagctaaaacagttggaacaatctacgattaaacccacagtagaaaaaactgcacaagtcctcaatgatgtaaaagatggaataactgtcgctggagttgctgctaaaacagcctcaacaaaagtgataaatggaggttctgacttaataagaaaactgacctcgcaaaacctagatgatagagctggagagagtgaactacatgaagaagttccaagtggagatagttcattgatcgacgatatgattcaacccgaatacttaccaaaagactacaatgagagtcagggtcctactcttttacaaatggtgaaagatatgggcaaaggtggaggaataactgacaaaatgtcagagcaagaaatggaaagtaagataaaggctttgaaagcgtctgctaaaaataaaattgcaaatcttaaactgactaaggaggaaatcataaagtcagctactgtagtgaagggggtgataaacgtacttctcactgcagcagggaagggtgatcatgccgacatgaagcccaacgaggttgaaaaggcaaagtctctggtggatgagttagtgagctacgcaacagctgagcttatcaacaagagtgacaagattggccagggcgaagaagaagaagatgaggatgacgaggctgataaaaaagaaaaaaatctatttgtatctacagagccattaacggattctaaccctacgaaaaacgaaccagtgaaggttccaacagatgccagcaagagtgttgcagagaacctaacagccattcaaccaattgatggaagcgttgggaaagttgttggaggtaatttggacgaaagccatgcggaagtccaaaaaagtaggtctgatgaagtaggcacaggaaatttgaaccaagcgaccgatcaaaccgtcaaaaatgttggccaagaattggaagataataatgaaaatctagaaaatgttaacccggaagttaaaaaagataaattagagaacgtaaacttaaaaactcaagaccaaacagaaaaagctaattctgaacaggatgaagtagaacgtagccaagaatacacagcgattacaattcctgaacctgaataa

SEQ ID NO: 1409 - DNA, 480 bp, Tobacco mosaic virus
  source 1..480: mol_type = genomic DNA
tcaagttgcaggaccagaggtccaaaccaaaccagaagagctctcgaaagagctccgattataagatccggttcctctgatcaattctactattaaattatttatcgcgctccttatggccaccgttgcgtcgtctactctacgagtagcatctaacgtctcggcagtcgtggggttcgcctgattttcaacttctattattctatttctagtgtcgaatgcacctaacagtgctgtgactagcgggtctaataccgcattgtacctgtacaccttaaagtcactgtcagggaacctaacagttacttgtggtgaaggtttccacacctcactgaattgtctttgaacgacagttcgagcttgttgtgtttgaaactgatttcctaaggcattagtacataaattaattaactctattgggtcggcccacgctgatgacaagaacacgaactgagatggagtagtgatactgtaagacat

SEQ ID NO: 1410 - DNA, 470 bp, Tobacco mosaic virus
  source 1..470: mol_type = genomic DNA
ctgtttagccggtttggtcgtcacgggcgagtggaatttgcctgacaattgcagaggaggtgtgagcgtgtgtctggtggacaaaaggatggaaagagccgacgaggccactctcggatcttactacacagcagctgcaaagaaaagatttcagttcaaggtcgttcccaattatgctataaccacccaggacgcgatgaaaaacgtctggcaagttttagttaatattagaaatgtgaagatgtcagcgggtttctgtccgctttctctggagtttgtgtcggtgtgtattgtttatagaaataatataaaattaggtttgagagagaagattacaaacgtgagagacggagggcccatggaacttacagaagaagtcgttgatgagttcatggaagatgtccctatgtcgatcaggcttgcaaagtttcgatctcgaaccggaaaaaagagtgatgtccgtaaaggga

SEQ ID NO: 1411 - DNA, 777 bp, Tomato spotted wilt virus
  source 1..777: mol_type = genomic DNA
atgtctaaggttaagctcactaaggaaaacattgttgctttgttgacacaaggcaaagatcttgaatttgaagaagatcagaatctggtagcatttaacttcaagactttttgtctggaaaaccttgaccagatcaagaagatgagcattatttcatgtctgacattcctgaagaatcgtcagagtataatgaaggttattaagcaaagtgattttacttttggcaaaatcactataaagaaaacttcagacaggattggagccaccgacatgaccttcagaaggcttgatagcttgatcagggtcaggcttgtcgaggaaactgggaattctgagaatctcaatactatcaaatctaagattgcttctcaccctctgattcaagcctatggattacctcttgatgatgcaaagtctgtgaggcttgccataatgctgggaggtagcttacctcttattgcttcagtagatagctttgagatgatcagtgttgtcttggctatatatcaggatgcaaaatacaaagacctcgggatcgatccaaagaagtatgacaccagggaagccttaggaaaagtttgcactgtgctaaaaagcaaagcatttgaaatgaatgaagatcaggtgaagaaagggaaagagtatgctgctatacttagctccagcaatcctaatgctaaaggaagtattgctatggaacattacagtgaaactcttaacaagttctatgaaatgttcggggttaaaaaacaggcaaaacttgcagaacttgcttaa

SEQ ID NO: 1412 - DNA, 777 bp, Tomato yellow leaf curl virus
  source 1..777: mol_type = genomic DNA
atgtcgaagcgacccggcgatataatcatttccacgcccgtctcgaaggttcgccgaaggctgaacttcgacagcccctacagcagccgtgctgctgcccccattgtccaaggcataaacaagcgtcgatcatggacgtacaggcccatgtaccgaaagcccagaatatacagaatgtatcgaagccctgatgtaccccgtggatgtgaaggcccatgtaaagtccagtcctatgagcaacgggatgatattaagcatactggtattgttcgttgtgttagtgatgttactcgtggatctggaattactcatagagtgggtaagaggttctgtgttaaatcgatatattttttaggtaaagtctggatggatgaaaatatcaagaagcagaatcacactaatcaggtcatgttcttcttggtccgtgatagaaggccttatggaagcagcccaatggattttggacaggtttttaatatgttcgataatgagcctagtaccgcaaccgtgaagaatgatttgcgggataggtttcaagtgatgaggaaatttcatgctacagttattggtgggccctctggaatgaaggaacaggcattagttaagagattttttagaattaacagtcatgtgacttataatcatcaggaggcagccaagtatgagaaccatactgaaaacgccttgttgttgtatatggcatgtacgcatgcctctaatccagtgtatgcaactatgaaaatacgtatctatttctatgattcaatatcaaattaa

SEQ ID NO: 1413 - DNA, 351 bp, Tomato yellow leaf curl virus
  source 1..351: mol_type = genomic DNA
atgtgggacccacttctaaatgaatttcctgaatctgttcacggatttcgttgtatgttagctattaaatatttgcagtccgttgaggaaacttacgagcccaatacattgggccacgatttaattagggatcttatatctgttgtaagggcccgtgactatgtcgaagcgaccaggcgatataatcatttccacgcccgtctcgaaggttcgccgaaggctgaacttcgacagcccatacagcagccgtgctgctgtccccattgtccaaggcacaaacaagcgacgatcatggacgtacaggcccatgtaccgaaagcccagaatatacagaatgtatcgaagccctga

SEQ ID NO: 1414 - DNA, 1074 bp, Tomato yellow leaf curl virus
  source 1..1074: mol_type = genomic DNA
ttacgccttattggtttcttcttggctatcttgtgttggaccttgattgatacttgcgaacagtggctcgtagagggtgacgaaggttgcattcttgagagcccaatttttcaaggatatgtttttttcttcgtctagatattccctatatgaggaggtaggtcctggattgcagaggaagatagtgggaattccccctttaatttgaatgggcttcccgtattttgtgttgctttgccagtccctctgggcccccatgaattccttgaagtgctttaaataatgcgggtctacgtcatcaatgacgttgtaccacgcatcattactgtacacctttgggcttaggtctagatgtccacataaataattatgtgggcctagagacctggcccacattgttttgcctgttctactatcaccctcaatgacaatgcttatgggtctccatggccgcgcagcggaagacacgacgttctcggcgacccactcttcaagttcatctggaacttgattaaaagaagaagaaagaaatggagaaacataaacttctaaaggaggactaaaaatcctatctaaatttgaacttaaattatgaaattgtaaaatatagtcctttggggccttctcttttaatatattgagggcctcggatttactgcctgaattgagtgcttcggcatatgcgtcgttggcagattgctgacctcctctagctgatctgccatcgatttggaaaactccaaaatcaatgaagtctccgtctttctccacgtaggtcttgacatctgttgagctcttagctgcctgaatgtttggatggaaatgtgctgacctgtttggggataccaggtcgaagaaccgttggttcttacattggtatttgccttcgaattggataagcacatggagatgtggttccccattctcgtggagttctctgcaaactttgatgtattttttatttgttggggtttctaggttttttaattgggaaagtgcttcctctttagagagagaacaattgggatatgttaggaaataattcttggcatatattttaaataaacgaggcat

SEQ ID NO: 1415 - DNA, 408 bp, Tomato yellow leaf curl virus
  source 1..408: mol_type = genomic DNA
ctaaatactcttaagaaatgaccagtctgaggctgtaatgtcgtccaaattcggaagttgagaaaacatttgtgaatccccattaccttcctgatgttgtggttgaatcttatctgaatggaaatgatgtcgtggttcattagaaatggccgctggctgtgttctgttatcttgaaatagaggggattgtttatctcccaaataaaaacgccattctctgcctgaggagcagtgatgagttcccctgtgcgtgaatccatgattgttgcagttgaggtggaggtagtatgagcagccacagtctaggtctacacgcttacgccttattggtttcttcttggctatcttgtgttggaccttgattgatacttgcgaacagtggctcgtagagggtgaggaaggttgcat

SEQ ID NO: 1416 - DNA, 405 bp, Tomato yellow leaf curl virus
  source 1..405: mol_type = genomic DNA
atggattcacgcacaggggaactcatcactgctcctcaggcagagaatggcgtttttatctgggagataaacaatcccctctatttcaagataacagaacacagccagaggccatttctaatgaaccacgacatcatttccattcagataagattcaaccacaacatcaggaaggtattggggattcacaaatgttttctcaacttccgaatttggacgacattacagcctcagactggtcgtttcttaaaagtatttagacatcaagttcttaagtatttagatagtattggtgtaatttcaattaacaatgtaatcagagcagttgatcatgtattgtatgatgtacttgaaaacacaataaatgtaacagaaactcatgatataaaatataaattttattaa

SEQ ID NO: 1417 - DNA, 239 bp, Tomato yellow leaf curl virus
  source 1..239: mol_type = genomic DNA
atgggcaaccgcatctccatattctcttgcagttcgaggggaaattcaactgcaaaaataacagattcttcgatctggtatccccaaccagatcagcacatttccatccgaacattcagggagctaaatcgagctccgacgtcaagtcctatatcgacaaggacggagatgttcttgaatggggaactttccagatcgacggacgatctgcaaggggaggacaacagacagccaacgac

SEQ ID NO: 1418 - DNA, 657 bp, Cucumber mosaic virus
  source 1..657: mol_type = genomic DNA
atggacaaatctgaatcaaccagtgctggtcgtaaccgtcgacgtcgtccgcgtcgtggttcccgctccgccccctcctccgcggatgctaactttagagtcctgtcgcagcagctttcgcggcttaataagacgttagcagctggtcgtccaactattaaccacccaacctttgtagggagtgaacgctgtagacctgggtacacgttcacatctattaccctaaagccaccaaaaatagaccgtgggtcttattacggtaaaaggttgttactacctgattcagtcacggaatatgataagaagcttgtttcgcgcattcaaattcgagttaatcctttgccgaaatttgattctaccgtgtgggtgacagtccgtaaagttcctgcctcctcggacttatccgttgccgccatctctgctatgttcgcggacggagcctcaccggtactggtttatcagtatgccgcatctggagtccaagccaacaacaaactgttgtacgatctttcggcgatgcgcgctgatataggtgacatgagaaagtacgccgtcctcgtgtattcaaaagacgatgcgctcgagacggacgagctagtacttcatgttgacatcgagcaccaacgcattcccacgtctggagtgctcccagtctga

SEQ ID NO: 1419 - DNA, 303 bp, Cucumber mosaic virus
  source 1..303: mol_type = genomic DNA
atggatgtgttgacagtagtggtgtcgaccgccgacctccacctagcccatttgcaggaggtgaaacgtcgaagacgaaggtctcacgtcagaaaccggcgagcgaggggttacaaaagtcccagcgagagagcgcgatctatagcgagacttttccagatgttaccattccacggagtagatcccgtggattggtttcctgatgtcgttcgctctccgtccgttaccagccttgtttcttatgaatcttttgatgatactgattggtttgctggtaacgaatgggccgaagggtcgttttga

SEQ ID NO: 1420 - DNA, 840 bp, Cucumber mosaic virus
  source 1..840: mol_type = genomic DNA
atggctttccaaggtaccagtaggactttaactcaacagtcctcagcggctacgtctgacgatcttcaaaagatattatttagccctgaagccattaagaaaatggctactgagtgtgacctaggccggcatcactggatgcgcgctgataacgctatttcagtccggcccctcgttcccgaagtaacccacggtcgtattgcttccttctttaagtctggatatgatgttggtgaattatgctctaaaggttatatgagcgtccctcaagtattgtgtgctgttactcgaacagtttccaccgatgctgaaggatctttgagaatttacctggctgatctaggcgacaaggagttatctccgatagacggacaatgcgtctcattacataatcatgatcttcccgctttagtgtctttccaaccgacgtatgattgtcctatggagacagttgggaatcgtaagcggtgttttgctgttgttatcgaaagacatggttatattgggtataccggcaccacagctagcgtgtgtagtaattggcaagcacggttctcttctaagaacaacaactacactcatatcgcagctgggaagactctagtactgcctttcaacagattagctgagcaaacaaaaccgtcagctgtcgctcgcctgttgaagtcgcaattgaacaatatcgaatcttcgcaatacgttttaacgaatgcgaggattaatcaaaatgcgcgcagtgagtccgaggaattaaatgttgaaagccctcccgccgcaatcgggagttcttccgcgtcccgctccgaagccttcagaccgcaggtggttaacggtctttag

SEQ ID NO: 1421 - DNA, 2982 bp, Cucumber mosaic virus
  source 1..2982: mol_type = genomic DNA
atggcgacgtcctcgttcaacatcaatgaattggtagcctcccacggcgataaaggactactcgcgaacgccctcgttgataagacagctcatgagcagctcgaggagcaattacagcatcaacgtagaggccgtaaggtctacattcggaacgttctgagtgtaaaggattccgaggtcatccggaatcggtatggaggaaagtacgacctccatcttacccagcaggagtttgctccccacggcctagctggtgccctccgcttgtgtgaaactctcgattgtctagactctttcccttcatcaggtctgcggcaggacctcgtcttagacttcggaggaagttgggtcacacattacctccgcggacataacgtacactgttgttccccttgtttgggtatccgcgataaaatgcgccatgcggaacgtttaatgaacatgcgcaagatcatcttgaacgatccacagcagttcgatggtcgacagccggatttctgcactcatcctgctgctgattgcaaagtacaagcccactttgctatatctattcatggaggttatgatatgggctttagaggattatgtgaagcaatgcatgctcacggaaccaccattttgaagggaacgatgatgttcgatggtgcaatgatgtttgacgaccaaggcataatacctgagcttaattgtcagtggaggaagattaggaatgctttctccgaaactgaagacgtcacacctttgtctggaaaaattaattccacagtattcacccgcgtgcgtaagtttaagactttggtagcttttgatttcatcaatgagtctaccatgtcctatgttcatgattgggagaatataaaatcgtttttgacggaccagacatactcgtataaagggatgacttatggcatcgaacgttgtgtcattaatgcgggtatcatgacgtataagattatcggtgtgcctgggatgtgcccacccgaactcattcgacattgtatttggttcccttctattaaggactatgttggtctgaagattcccgcgtcgcaggacttggttgaatggaaaacagtgcgcattttaacgtcaacattacgtgagactgaagagattgccatgaggtgttataacgataagaaggcttggatggagcagtttaaggttatcttaggtgttctctccgctaagtcatccaccattgttattaatggtatgtccatgcaatctggcgaacggatcgatatcaatgattatcattatataggattcgccattcttcttcacacaaaaatgaagtatgagcaattagggaagatgtacgatatgtggaatgcttcgagtatctcgaaatggttcgcagcgttgactcgtccgctgcgtgtgttcttctctagcgttgttcacgcgctgttcccgactttgagaccccgcgaggaaaaagaattcctgattaagctctccaccttcgtgactttcaacgaagagtgctcgtttgatggtggagaggaatgggacgtgatatcatctgctgcattcgttgctacgcaggctgttaccgatgggaagattttggctgcacagaaggccgagaagctcgctgagaagcttgcacaacccgtgattgaggtatcggacagtcctgaagcgtcatctccaacgcttgatgatactgctgatgtttgtggaagggagcaagaagtttcggaacttgactccctgtcagttcagacacgttcccccatcactagaattgctgaaagggctactgctatgttagagtatgccgcttacgagaaacagttgcacgacaccacggtgtccaatctgaaacgcatttggaatatggcgggtggtgatgacaagaaaaattccctcgaaggcaacttgaagtttgtctttgacacgtattttaccgttgatcctatggtgaatgttcatttctccacaggtcggtggatgcgtcctgtgcctgaagggattacttattctgtcggttacaacgaacgcggtttgggtccgaaatctgatggagagctttacattgtcaatagtgagtgtgtgatcagtaatagcgagtctttgtctactatcacgcgctcgttacaagctccgactggcaccattagtcaagttgatggggtcgccgggtgcggaaaaactacggcaattaaatcaatttttgagccgtccacagatatgatcgttaccgctaacaagaaatccgcccaagacgtgcgtatggcacttttcaaatcgtcggactccaaagaggcttgcactttcatccgaacagccgactctgttttgctcaatgaatgtccgaccgtgagtagagttttggttgatgaggtcgtgttgctgcactttggtcaattatgtgccgtcatgtccaaactgaaggctgtgagagctatatgtttcggggattcagagcagattgctttttcctctcgagatgcctcgtttgacatgcgtttctctaagatcattcctgatgaaactagtgatgcggacaccacattccgtagcccacaagacgtcgtgccgcttgtgcgtttgatggctacgaaggcccttccgaaaggaacccgttcaaagtatacgaagtgggtttctcaatctaaagtgaagagatctgttacatctcgggctgttgcaagtgtgacgttggttgatttggatgaatctagattttacgtcacgatgacacaagctgataaagcttcactgatttcaagggcgaaagagatgaacttaccgaagactttctggaacgaaaggatcaaaaccgtgcatgaatctcaaggcatttctgaggatcacgttactttggtaagattaaagagcacaaagtgtgacctgtttaagaaattttcctactgtcttgtcgctttaaccaggcataaggtcaccttccgctacgagtattgtggtacattaaacggcgatttaatcgccgagtgtgttgctcgtgtttag

SEQ ID NO: 1422 - DNA, 2577 bp, Cucumber mosaic virus
  source 1..2577: mol_type = genomic DNA
atggctttccccgcccccgctttctcactagccaatcttttgaacggcagttacggtgtcgacactcccgaggaagtggaacgcgtgcgatctgagcaacgcgaagaggctgctgcggcctgtcgtaattacaggcccttacccgctgtggatgtcagcgagagtgtcccagaggatgcgcattccctccgaactccagacggagctccctccgaagaggtgtctgtagagtttgttacttatggtgctgaagattaccttgaaaaatctgatgatgagctccttgtcgcttttgagacgatggtcaaacccatgcgtatcggacaactgtggtgccctgcgtttaataaatgttcttttatttccagcattgccatggccagggctttgctattagcacccagaacatcccaccgaaccatgaagtgttttgaggacctggtcgcggctatttacactaaatccgatttctactacgatgatgagtgtgaagccgacgacgttcagatagatatctcgtctcgcgatgtacccggttattctttcgaaccgtggtcccgaacgtctggatttgaaccaccgcctatctgtgaggcgtgtgacatgatcatgtaccagtgcccgtgttttgatttcaatgctttaaagaaatcgtgcgctgagaggacattcgctgatgattatgttatcgaaggtttagatggtgttgtagacaatgcgactctgttgtcgaatttaggcccgtttttggtgcctgtgaaatgtcagtatgagaaatgtccaacacccaccgttgcgaatcctccgagtcttaatcgtgctactgatcgtgttgatatcaatttagttcaatccatttgtgactcgactctgcccactcatagtaactacgacgactcttttcatcaagtgttcgtcgagagtgctgactattctattgatctggatcatgttagacttcgccagtctgatcttattgcaaaaatcccagattcagggcatatgataccggttttgaacaccgggagcggtcacaagagagtaggtacgacgaaggaggtccttacagctatcaagaaacgtaatgctgacgttccagagctaggtgattccgttaatctgtccagattgagtaaggctgtggctgagagattcttcatttcatacattaatggtaactctctagcatccagcaactttgttaatgtcgttagcaacttccacgattacatggaaaaatggaagtcctcaggtctttcgtatgatgatcttccggatcttcatgctgaaaatttgcagttttatgatcacatgataaaatctgatgtgaaacctgtagtgagcgacacactcaacgttgacagaccggttccggctactataacgtatcataagaaaggtataacctcccagttctcaccgttgtttactgcgctatttgagcgtttccagagatgccttcgagaacgcattattcttcctgttggaaagatttcatcccttgagatggcaggatttgatgttaagaacaagcactgtctcgagattgatttgtccaaattcgacaagtctcaaggtgaattccatctaatgattcaggaacacattttgaatggtctagggtgcccagctcctataactaagtggtggtgtgatttccacagattctcttatattagagaccgtagagctggcgttggtatgcccatcagttttcagagacgaactggtgatgcattcacctacttcggtaacaccattgtcaccatggctgaatttgcatggtgttacgacaccgaccaattcgaaaagcttttattctcaggcgatgattctctaggattttcagtacttcctcctgttggtgatccgagtaagttcacgactctcttcaacatggaagctaaggtgatggagcccgcagtaccatatatttgttcgaagttcttactctctgacgagttcggtaacactttttccgttccagatccattgcgcgaggttcagcggttaggcacgaagaaaatcccctattcagacaatgatgaattcctgtttgctcacttcatgagctttgttgatcgattgaagtttttggaccgaatgactcagtcttgtatcgatcagctttctctcttcttcgagttgaaatacaggaagtctggggccgaggctgctttaatgttaggcgcctttaagaaatataccgctaatttccagtcctataaagaactctactattcagatcgtcgtcagtgcgaattgatcaattcgtttagttgtgtagagttaaggattgagcgttcgagttccactaagcagcgaaagaagaaagatggaattgaacgaaggcgcaatgacaaacgtcgaactccaactggctcgtatggtggaggcgaagaggcagagacgaaggtctcacaagcagaatcgacgggaacgaggtcacaaaagtcccagcgagagggcgcgttcaaatctcaggctgttccgcttcctaccattctaccaagtagatggttcggaactgatagagatgtaccaccatgtgaacatggtgggattgtccgagtctga

SEQ ID NO: 1423 - DNA, 801 bp, Potato virus Y
  source 1..801: mol_type = genomic DNA
gcaaatgacacaatcgatgcaggaggaagcagcaagaaagatgcaagaccagagcaaggcagcatccagtcaaacccgaacaaaggaaaagataaggatgtgaatgctggtacatctgggacacatactgtgccgagaatcaaggctatcacgtccaaaatgagaatgcccacaagcaagggagcaaccgtgctaaacttagaacacttgcttgagtatgctccacaacaaatcgatatttcaaatactcgggcaactcaatcacagtttgatacgtggtatgaggcagtgcggatggcatacgacataggagaaactgagatgccaactgtgatgaatgggcttatggtttggtgcattgaaaatggaacctcgccaaatgtcaacggagtttgggttatgatggatgggaatgaacaagtcgagtacccgttgaaaccaatcgttgagaatgcaaaaccaacccttaggcaaatcatggcacatttctcagatgttgcagaagcgtatatagaaatgcgcaacaaaaaggaaccatatatgccacgatatggtttaattcgaaatctgcgggatatgggtttagcgcgttatgcctttgacttttatgaggtcacatcacgaacaccagtgagggctcgggaagcgcacattcaaatgaaggccgcagcattgaaatcagcccaacctcgacttttcgggttggacggtggcatcagtacacaagaggagaacacagagaggcacaccaccgaggatgtctctccaagtatgcatactctacttggagttaagaacatg

SEQ ID NO: 1424 - DNA, 777 bp, African cassava mosaic virus
  source 1..777: mol_type = genomic DNA
atgtcgaagcgaccaggagatatcatcatttccactccaggctcgaaggttcgtcgaaggctgaacttcgacagcccatacaggaaccgtgctactgcccccactgtccacgtcacaaatcgaaaacgggcctggatgaacaggcccatgtacagaaagcccatgatgtacaggatgtatagaagcccagacatacctagaggctgtgaaggcccatgtaaggtccagtcgtttgagcagagggatgatgtgaagcaccttggtatctgtaaggtgattagtgatgtgacacgtgggcctgggctgacacacagagtcggaaagaggttttgtatcaagtccatttacattcttggtaagatctggatggatgaaaatattaagaagcagaatcacacgaataatgtgatgttttacctgcttagggatagaaggccttatggcaatacgccccaagactttgggcagatatttaacatgtttgataatgagcccagtactgcaacaatcgagaacgatttgagggataggtttcaggtgttgaggaaatttcatgccactgttattggtggtccatctggcatgaaggagcaggcgttggtgaaaaggttttacaggttgaatcatcacgtgacatacaatcatcaggaggcagggaagtacgagaatcacacagagaatgctttgcttttgtacatggcatgtactcatgcctccaatcctgtatatgctacgttgaaaatacgtatatacttctatgacagtattggcaattaa

SEQ ID NO: 1425 - DNA, 777 bp, African cassava mosaic virus
  source 1..777: mol_type = genomic DNA
atgtcgaagcgacccgccgatatcaatcttttccactctcgcctcgaagtgcggcgaagactgaacttcgacagcccgttcagcagccgtgctactgtccaattgtcaaggcatacccaacagcgtacatatgggccaacaggcccatgtatcggaagcccaagatgtacagaatgtatcgaagcccataaggtccctaagggctgtgaaggcccatgtaaggttcagtcctatgaacagagggatgatgtgaagcacactggtatggtccgatgtgtcagtgatgttactcgtggatcaggcattacccatagagtcgggaagaggttttgtgtgaagtccatatatatattgggcaagatctggatggatgagaatgtcaagaagcaaaatcatacgaaccatgttatgttcttccttgtgcgagatagaaggccttatggtccgagtcctcaagattttggacaagtgttcaacatgtttgataatgaacctactactgcaactgtgaagaatgatcttagggaccggtatcaggtgttacgtaaattttatgcgacggttgttggtggaccctctgggatgaaggaacaagctctggttaagaagttttttaggatcaataatcatgtagtgtataatcatcaggaacaggccaagtatgagaatcatactgagaatgcgttgttattgtatatggcatgtacacatgcctcgaatcctgtgtacgctacgctgaaaatacgcatctatttctatgatgcagtgacaaattaa

SEQ ID NO: 1426 - DNA, 351 bp, African cassava mosaic virus
  source 1..351: mol_type = genomic DNA
atgtgggatccattgttgaatgagttcccccgagtctgtgcacggttttcgctgtatgcttgctattattatttgcaggccttagaggatacatacgagcccaatactttgggccacgatctagtccgtgatctcatctgcgttctccgagcccgtatttatgtcgaagcgacccgccgatatcaatcttttccactctcgcctcgaagtgcggcgaagactgaacttcgacagcccgttcagcagccgtgctactgtccaattgtcaaggcatacccaacagcgtacatatgggccaacaggcccatgtatcggaagcccaagatgtacagaatgtatcgaagcccataa

SEQ ID NO: 1427 - DNA, 1059 bp, African cassava mosaic virus
  source 1..1059: mol_type = genomic DNA
atgccgagagccggtcgttttcaaataaatgccaaaaattatttcataacctatccccgatgctccttagcaaaggaagaggccctttcccaattaaaagccatttcttacccgacgaatatcaaattcattagggtttgcagagaactacatcaggatggggtgcctcatctccatgttctcatccaattcgaaggcaagttccaatgtaccaaccccagattcttcgatctcatttccccatcccgatcaacacatttccatccgaacattcagggagctaaatcatcgtccgatgtcaaggcttacattgaaaagggaggggaatttcttgacgatggaattttccaagtcgatgccagaagtgccaggggggagggccagcatttagctcaggtatatgcagaagcgttgaatgcttcttctaaatcagaagctcttcaaattatcaaagaaaaggatccaaagtccttttttttacagttccataacatatctgctaacgcggatcgaatcttccaggctccgccacaaacttacgttagtccgttcttatcatcctcatttacgcaagtcccagaggaaatagaagtatgggtatccgaaaatatatgccgtcccgctgcgcggccatggagaccgatcagtattgttctcgaaggtgatagccgaaccgggaagacgatgtgggcccgatcactgggcccacataactatctatgtggacacctggatctgtctcccaagatatattcaaacgacgcatggtacaacgtcattgacgacgtagacccgcattatctaaagcatttcaaagaattcatgggggcccaacgagattggcaatcaaacacaaaatacggaaagcccattcaaattaaaggtgggattcccaccatcttcttatgcaatccgggccccaattcgtcctataaagaatacctagacgaggacaagaattccaatctcaagaattgggcaatcaagaatgcgctcttcatctccctcacagagccactcttctcctccaccgatcaaagccaggcacaggcaagctaa

SEQ ID NO: 1428 - DNA, 408 bp, African cassava mosaic virus
  source 1..408: mol_type = genomic DNA
atgcgctcttcatctccctcacagagccactcttctcctccaccgatcaaagccaggcacaggcaagctaagctcagagcacctagacgtcgacgcatcgacctaacttgtggctgttccatctatcgcagcattaattgtcacaaccatggatttacgcacaggggaagacattggtgctcttcaatggaggagtggcgcctttatctgggagattccaaatcccctatatttcacaatcctcaaccacgacagcatgccgttcaacatgactcacgacataatagatgtccagattcggttcaactacaacctgaggcaagcactggggatgcacaagtgttttctcaacttccggatctggactcgtttacatcctcagacttggcgtttcttcagaacctttag

SEQ ID NO: 1429 - DNA, 405 bp, African cassava mosaic virus
  source 1..405: mol_type = genomic DNA
atggattctcgcacaggggaactcatcactgcgcctcaagcagagaatggcgtttttacctgggaaataacaaatcccctctatttcgaaatcacccaccacgacaagaggccagtgaacatgaaccacgacatcatcacatccagatacggttcaaccacaacatccggaaggcattggggattcacaagtgttttctcaacttcaaggtctggacgaccttacggcctcagactggtcttttcttacgagtattttagtatcaagtattcaagtatttacatatgtaggcgttatttccattaccctactgtacttcaagctgttgatcatgttctatacgatgtattactaaacacactccaagttacggagcaacatgcaataaaattcaacctttattaa

SEQ ID NO: 1430 - DNA, 1080 bp, African cassava mosaic virus
  source 1..1080: mol_type = genomic DNA
atgccacgagccggtcgttttcaaatcaatgccaaaaattatttcataacctatccccgatgttccttaacaaaggaagaggccctttcccaattaaacgccctttcttacccgacgaatatcaaattcattagggtttgcagagaactacatcaggatggggtgcctcatctccacgttctcatccaattcgaaggcaagttccaatgtactaactcgcgatttttcgatctcagttccccatcccgatcaacacatttccatccgaacattcagggcgctaaatcatcgtccgatgtcaaagcttacattgaaaagggaggggaatttcttgacgatggaattttccaagtcgatgccaggagtgcaaggggggagggccaacatttagctcaggtatatgcagacgcgttgaatgcttcttctaaatcagaagctcttcagattattaaagaaaaagatccaaagtccttttttttacagttccataacatatctgctaacgcagatagaatcttccaggctccgccacaaacttacgttagtccgttcttatcatcctcatttacacaagtcccagaagaaatcgaagtatgggtatccgaaaatatatgcagtcccgctgcgcggccttggagaccgatcagtattgttatggaaggtgatagccgaaccggtaaaaccatgtgggctcgttcactgggaccacataattatctatgtggacatctggatctgtctccaaaggtatattcaaacgacgcatggtataacgtcattgacgacgtcgacccgcattatctaaagcacttcaaagaattcatgggggcccaaagggactggcaatcaaacacaaagtacgggaagccgattcaaattaaaggcggcattcccacaatcttcctctgcaatccaggtccaacatcatcatataaagagtttctggaagaggaaaagaatcactcccttaaagcctgggctgtaaagaatgccaccttcatcaccctccacgagccattgttctcaagtgcccatcaaagtccaacaccgcaccgcgaagaccagagccctcaggcgtag

SEQ ID NO: 1431 - DNA, 408 bp, African cassava mosaic virus
  source 1..408: mol_type = genomic DNA
atgccaccttcatcaccctccacgagccattgttctcaagtgcccatcaaagtccaacaccgcaccgcgaagaccagagccctcaggcgtaggagggtagacctcgaatgcggctgctcgttctatctccatatcgactgcataaaccatggattctcgcacaggggaactcatcactgcgcctcaagcagagaatggcgtttttacctgggaaataacaaatcccctctatttcgaaatcacccaccacgacaagaggccagtgaacatgaaccacgacatcatcacatccagatacggttcaaccacaacatccggaaggcattggggattcacaagtgttttctcaacttcaaggtctggacgaccttacggcctcagactggtcttttcttacgagtattttag

SEQ ID NO: 1432 - DNA, 234 bp, African cassava mosaic virus
  source 1..234: mol_type = genomic DNA
atggggtgcctcatctccatgttctcatccaattcgaaggcaagttccaatgtaccaacccgagattcttcgatctcatttccccatcccgatcaacacatttccatccgaacattcagggggctaaatcatcgtccgatgtcaaagcttacattgaaaagggaggggaatttcttgacgctggacttttccaagtcgacgccagaagtgcaaggggagagggccagcatttag

SEQ ID NO: 1433 - DNA, 924 bp, African cassava mosaic virus
  source 1..924: mol_type = genomic DNA
atggacaaccaattcaccgtcacagacaagaattacatcaacagcaaacgcacagagtacgcattaaccaacgatgctgcaccaatcaatctccaattcccgagctcattcgagcaggctaccatgcgactcaaaggccgatgtatgaaaatcgaccacattataattgaataccgaaaccaggtcccatttaacgcaattgggtcggttatcgtagaaatcagagacaatcgcgtcagccttgaagacgctgctcaagcagcattcactttcccaatagcttgcaacgtagacctccactacttctcgtctacatatttttcgctttcagaaccctccccttggagaatcatgtacagagtcgaagactcaaacgtcatagaaggcgtgaaattcgcatccatcaaggccaagctccgattatcatcggccaaacattccacggacatacgtttcaaacccccaacaattaacatattatccaagggctacacaaaggattgcatagacttctggtccgtggaaaaaggagaaacacgacggagattactaaatccaactccacatgctaatagtcaacgacccataacccacaggcccatcaccattctccctggagaaacatgggccacgaagtctcaaattgggctacccagctcatccggcccagcaaggctggaccactttcgttcacagtccatgagaatgggcccatcgacaaccacaacggacttcgacaacgactccacagaatatccttaccagacactacacagattacacacacccgaattggacccaggggactcggtatcacagaccccatccgactcagtatcccgaaaggacctcgagacactgcttgagagtaccataaacaagtgtctcatcaaaataaaatccgaagcacccaggcaattgtaa

SEQ ID NO: 1434 - DNA, 777 bp, African cassava mosaic virus
  source 1..777: mol_type = genomic DNA
atgtattctgtttacaggcgtgggtataagacgccgtataggagttcgtatggcgctcgtgtaacaccatatgtttatcgtaagacggctggtaaacagacgtctaaatctcgtgtaccgcgaaagttggcgtatgaatcgccaaaatgtctatatacgcgacgctcattggaggatatccataatggggcttccttaaagttgcctcaacagggggattatacgtcctacgtgacactcccatgtcgaggtatcgatggtaatgggggtaggtctgttgatcatataaaattattaagcttgagggtgtctgggaccgtcaatatcagtcaatgcggtggtgatgataatatgggagagagaacgaccatgaggggtatttttttcatggcttgtcttgttgataagaaacctttcgttccagagggggttagtatattgccgacgtttaatgagttgttcggggaatatgaatccgtgtatggcatgcctaggttgaaggaaaacgttcgtcaccgttatcgcgtgattgggacgtcgaaattatatataacgaccgatgaagagcacatccagaagccatttagtctacgtcgaagactaagtggagggaaatatcctatgtggtcgtcgttcaaggatgtggataatagtagtacaggtgggaactataaaaatataaataagaacgctatactagttagttatgtgtgggtatcgctatgtcggtccacgtgtgatgtgtattcccagtttgtacttaattacgtcggttga

SEQ ID NO: 1435 - DNA, 411 bp, Plum pox virus
  source 1..411: mol_type = genomic DNA
gatggaaaagccccgtacattgcggagacagcactgaagaagctttacactgacactgaagcatctgagacagaaattgagcgatatcttgaagctttttacgacgacattaacgatgatggtgagtccaacgttgttgtgcaccaagctgacgaaagagaagacgaggaggaagttgatgcaggtaagccgattgtagccactgcaccggcagcaactagcccaatacttcaaccacctccagtcatacagcctgcaccccggactacggcgccaatgctcaaccccattttcacgtcagcaacaactcaaccagcaacaaaaccagtttcacaggtgtcaggacctcaactgcaaacttttggaacatatggtaatgaggatgcatcacctagcaactcaaacgcgcta

SEQ ID NO: 1436 - DNA, 616 bp, Plum pox virus
  source 1..616: mol_type = genomic DNA
gcatgttttgaaagcgaacacaatcaatcaacttattagctttgctagtgatacattggattcaagcatgaaaacatacctggtcggaggtcttgaagtggataagtgtgatgaattcaaaaatgtcaagctcttgatcagaagcatttacaagccacgaatcatggagcaggtgcttaaggaagaaccatatttactgctcatgagcgttttgtcacctggcgtcttgatggcgctgttcaatagtggttcattggagaaagccacacaatattggatcacacgatctcacagcttggcagcgatcatatcaatattatcagcacttgcagccaaagtttcacttgcaagtacactgaatgcacaaatgagtgtcattgacgaacatgcagcagtcctatgtgatagtgtgtttaatggaacaaggccatatgcatcttacatgatggcagtgaaaactttggaaaggatgaaagcacggacggaatccgatcacactttaaatgacttaggattctcggtactcagacaggcaacaccccacttggtggaaaaaaagttatctccaggaattagagcaagcttggaaagagttaagctggtcggaaaaattctc

SEQ ID NO: 1437 - DNA, 681 bp, Potato virus X
  source 1..681: mol_type = genomic DNA
atggatattctcatcattagtttgaaaagtttaggatattctaggacagcaagaccgttagacccaggtcctttagtagtacacgccgttgccggcgccgggaaatcgactgcacttcgcaagcttttagctagacactcgaccttcacagtgcacactcttggggttccggacaagatcagcattaggaccagaggaatacagaagcccgggcccattccagagggcaactttgccattttggacgagtacactttggacgcgactaccagagaagcttaccaggccctcttcgctgacccgtaccaggcaccagaactcagccttgagcctcacttctacttggagacttctttccgtaccccaagaagggtagccgctctgatagcgagctgcgggtttgactttgagaccaattcacaagaggagggccatttggaagtgactggaatcttcaaaggacctctgctgggcaaggtgatcgccatagactcagaatctgaggagactttgtccagacacggagtagggttcgtgaggccttgtcaagtgactggactggaattcccagtggtcacaattgtgtcagctgcacccatcgaggagatcggccaagccaccttgttctacaacgcaattacccggtccaaaggcttgacatatgtccgcgcagggacatag

SEQ ID NO: 1438 - DNA, 348 bp, Potato virus X
  source 1..348: mol_type = genomic DNA
atgtccgcgcagggacataggctgactgccccagtcaactcggaaaaagtgtacatagtattaggtttgtcatttgctttaatttcaattactttcctgctttctagaaatagcttgccccacgtcggggacaacatccatagtttaccacacgggggcgcctacagagacggcacaaaggcaatcttgtacaattcacccaacttaggctcaagggtcagtctgaacaacagcaagaacgctgcatttgccatcgtgctgttactgtcactactgatatatggaagccggcacttatctcaacgcaataatccttgtgcttgtggcaacgctcatagcagtcattag

SEQ ID NO: 1439 - DNA, 216 bp, Potato virus X
  source 1..216: mol_type = genomic DNA
atggaagccggcacttatctcaacgcaataatccttgtgcttgtggcaacgctcatagcagtcattagcaacagcctgataaggccagagccgtgtgtcatccgcatcaccggggagtcgatcacagtccatgcttgcaagttggacaaggacatcatcaaagctctggcagacctcaaacccctctccgttgagcggttaagtttccataattaa

SEQ ID NO: 1440 - DNA, 714 bp, Potato virus X
  source 1..714: mol_type = genomic DNA
atgtcagcaccagctagcacaacacaggccacagggtcaactacctcaactaccacaaaaactgcaggcgcaactcctgccacagcttcaggactattcaccattccggatggggatttctttggcacagcccgtgctatagtagccagcaatgccgttgcaacaaatgaggacctcagcaagattgaggctatctggaaggacatgaaggtgcccacagacactatggcacaggctgcttgggacttagtcagacactgcgctgatgtgggctcatctgctcaaacagaaatgatagatacaggtccctactccaacggcatcagcagagccagactggcagcagcaattaaagaggtgtgcacacttaggcaattttgcatgaagtatgccccggtggtatggaattggatgctgactaacaacagcccacctgctaactggcaagcacaaggtttcaagcctgagcacaaattcgctgcattcgacttcttcaatggagtcaccaacccagctgccatcatgcccaaagagggactcatccggccaccgtctgaagctgaaatgaatgctgcccaaacttctgcctttgtgaagattacgaaggctagggcacaatccaacgactttgccagcctagatgcagctgtcactcgaggtcgtatcactggaacgacaaccgctgaggctgttgtcactctcccaccaccataa

SEQ ID NO: 1441 - DNA, 255 bp, Citrus tristeza virus
  source 1..255: mol_type = genomic DNA
ccccttcgagtctggggtaggactaacgatgctctttacttagccttttgtagacagaaccgcaatttgagttatggcggacgtccgctagatgcagggattccggctgggtatcattatttgtgtgcagatttcttgaccggagctggcttgacaaatttagaatgtgctgtgtacatacaagctaaagaacaattgttgaaaaagcgaggggctgatgaggttgtagttactaatgtcaggcagcttgggaaa

SEQ ID NO: 1442 - DNA, 156 bp, Citrus tristeza virus
  source 1..156: mol_type = genomic DNA
atggactgcgtaattcaagggtttttaactttcctagttggtatagctgtgttttgtgcctttgccggactgattatcattgttataacaatttatcggtgcacgattaagcccgtcagaagtgcttccccttacggcactcacgcgactgtctaa

SEQ ID NO: 1443 - DNA, 1785 bp, Citrus tristeza virus
  source 1..1785: mol_type = genomic DNA
atggtgcttttgggtttagacttcggtaccacgttttcaacggtggctatggctacaccttcagagttagttatactcaaacaatccaattcatcgtacatacctacgtgtttactcctgcatgcggaacctaacagcgtatcttatggttacgatgcggaatatttagcggcttctggggagtctggttcgttttacaaagatttgaagcggtgggtgggttgcactgcgaagaactaccaaacctacttacacaaactatcaccttcctataaggtgatagtgaaagagttgggaactaagagcgtgccggtgccatatttgtcacctctgaataacgaattaggactcagcgtcgctttaccttcactgattgcttcgtatgccaaatccattctgtcggatgcggaacgagtgttcaatgtaagctgcactggagttatatgttcggtacctgctggttataacacgttacaacgagcttttacacagcagagcatatcgatgtcgggttactcttgtgtgtacattattaacgaaccttcagcagccgcgtactccactttacctaagttgaattcggcagataagtatttagccgtttacgacttcggcggtgggacttttgatgtctctatagttagcgttagattacccactttcgccgttagaagttcgagcggtgacatgaatttaggcggtagagatatcgacaaaaagttatccgataaaatatacgaaatggctgattttgtgccgcaaaaagaattgaacgtttctagtttaaaggaagctttatctcttcaaaccgatccggtcaaatatactgtgaatcattacggaatgagtgagaccgtatcaattgatcaaacggtgttgagggagatagcctcggtgttcataaatcgaacgatagatatacttacgcaagttaaggttaagtctagtatgcccgaatcgcaaagtttgaagttagtggtagtcggtggaagctcgtacctaccagggttgttggacgctttggcaaccgtgccttttgtgtctgggatagtgccggtggaagacgcaagaaccgctgtcgccacagggtgcgctttgtatagcgagtgcttagatggtaggtctaaggccctactaatagattgtattacgcatcatttgtcggtcacgacgtttagcgcggattcggtcgttgttgcagcggccggtagtccaattccttttgaaggtgaacaaaaactcacgttacgcaaatgcgttagtacgtctaactatcaagcaagaatgttcgaaggggattacgaaaaagttttccgaaatgaacgtatatacgcagcttcgatatcattgtttacattaggagttaattggagtgtgcctaacgacgttgagatgactctcgtgaccaaagtggactcgatgggtaaagtggaattttaccttaaaggtccatctggtgaactggttaacgtgcaaggtacttcgcattacgattatgctggtatgcctcaccccactagaaagctggtgaggcttagcgattacaatgtaaactccgccgctttagttttagctttgacattaactcgcgaaaaacgagaaaagttccttttgcgaacattatttgacactttactagcggatttacgaaagacagcaagtttaggcgagtactcaaagaagtacccgatcactcgaaacgatatcgatgtcgtctcatcacgtatggggatcgttgtttcgaaagttttacggggaagcgatttggaaagaatacctctctga

SEQ ID NO: 1444 - DNA, 1605 bp, Citrus tristeza virus
  source 1..1605: mol_type = genomic DNA
atgtcgtctcatcacgtatggggatcgttgtttcgaaagttttacggggaagcgatttggaaagaatacctctctgaatcaactcgaaatttcgatgaaagaaatgtatcgttagaccacacttggagttcgggtgtggtcgtccgtaggcagagtcttttgaatgcgcctcaaggtactttcgagaacgagttagcgctattgtacaattcggtggtgattaacgattttgttgagttgactggtatgcccttgaaatctatgacaggtatcgaagaccgtaaggtacctgacgaattaatatccgttgacccgcacgaagtcggatgtaacttcacgttaatcgacgtggaatcgtatctaatgagcaggggtgaagatttcgctgatctagcggcggtcgagcattcgtggtgtttcagcaactcttgtggtagactatttagttcgactgagatagatgcttacaaaaccttggtgtttactaagaattttgatagtaatgtatcccgagtgactactaagttagagacttatctatcgtactgcatatcattgtacaagaaacattgcatgaaagacgatgattattttaatcaaatcttacctatgtttaattgtttaatgaaagtgctggcgtcgcttggtttgttttatgagaatcatgccgacaatccgctactgaccggaatgctcatagagttttgcctagaaaataaggtgtattactctacttttaaagtgaatttagacaacgtcagattgtttaagtctaaagtgttgcctgtggtgttaacggtttgggatatatccgagcctgatgacccaatggatgaaagggtgctgattcctttcgatcctacggatttcgtgctcgatttacctaaattgaatatacacgatacaatggtggtggtgggtaatcaaatcagacagttagaatacgtagtcgaaagcgatgctttagacgatctatctcaacacgttgatttacgtttagcagcggacaatcccgatctacgcgtttgtctgcgttgggcagggatgtttgtgtactacgctgtttatcggtgtgttgttgatagagcggtggaacgaccgacgttgtttagattgccgcagaaactactgactcaggatgatggcgaatcgtgctcattacacatgggttccgtcgaagctttattcaatctggtgcagaaagtgaacaaggacatttacgttagacgtcagttcatgggacgtcatagtgaagtggcttttcgactgtatcgcaacttaggtttgaggtttccaccgatctcatcggttaggttaccggctcatcacggttatttatacgtcgatttttacaaaagagtacctgacggtgctgttaccgccgtcgaactcgaaagtttacgtcaattacgctcatccgtggacgttatgtgtaaggacagggtgtcaatcacacctccaccattcaatcgacttagaagaggatcttctagaacatttagaggtcgaggcgcacgcggtgcgagctcgggtcatatgagcagagacgtggcgacttccgggtttaatttaccttatcatggcaggttatacagtacttcctaa

SEQ ID NO: 1445 - DNA, 552 bp, Citrus tristeza virus
  source 1..552: mol_type = genomic DNA
atgcgagcttactttagtgttaacaattacataagccttttggctaaggtcagcgcagttgtggaacgtttatgcgatcccagcgtaactctcacggaagtgatagacgaaattgatgaatttaactcgtttctcgctttggtgcactctatgaagtcagacgtgaacggagaccatcaggatggccaccatgagatgggtgaacacaagtctcgattgttatgcaatatagaggcgaaattgcgagtacttctcgacattataaggcgtcggttcactcgcgaaaagctgctttgtaccagcgcggtagatgtcatgggcttcttcgttatgaggtacatgagctccagccacactaagcttcgagtctgtaatgagaacggagttgaagttagtagtttaaaggtggtactgtcggatctgtcccgcgcgcataagttggattttagcgagcgagcttttgctgcttacggtatccttttgcaaaaggggaccgtgtcgaccgtttgcggccagtttgacattaatttagtctctccatcttgcgtgtag

SEQ ID NO: 1446 - DNA, 633 bp, Citrus tristeza virus
  source 1..633: mol_type = genomic DNA
atggataatactagcggacaaactttcgtttctgtgaacctttctgacgaaagcaacacagcgaccactgacgtcgaacccgtgagttcggaagcggatcgcttggattttttacagaaaatgaataatcccattattatcgatgctttgatacggaagaatagttatcagggcgctcgctttcgcgcgagaataataggagtgtgcgtggattgcggtagaaaacacgataaggggttgaagactgaacgtaagtgtaaggtcaacaatacgcagtctcagaacgaggtggcgcatatgttaatgcacgaccccgttaagtatttaaacaaaagaaaagctagagccttttctaatgcggagatatttgcgattgatttggttatgtacaccaaggaaaggcaattggctattgatttggccgctgaaagggagaaaacgagactggctcgtagacacccgatgcgttctccggaagaaactccggaatattataaattcggtaggactgctaaagcaatgttaccggacatcaacgccgtagacgttggtgataacgaggaaacttcgtcggagtatccagtgagtctgagtgtttctggcggagttctccgtgaacaccacttcatctga

SEQ ID NO: 1447 - DNA, 909 bp, Citrus tristeza virus
  source 1..909: mol_type = genomic DNA
atgtttgccttcgcgagcgaaagccaagacttgttagaagaaattgtttttcgtcgtagaacttaccatcgtaaatattttggtgacgtggttaaggacttcactatcgatattggttatgatactaccgatcgcgatcctactgtattggccgattatttctcattgtatttctttttacttaacaacgatagtgttgggcctatagcagcctcaattgtggtaagcccaccggttagcgggactcataaaattcgagcgcatatcgataatcaaccgaactgtgaaggtaacgtgacttacgttaaaaccttcgacaaaagtcgctttgtgtttcgcgttaaagcgtccccgtctatgagaggttactactcttttcgggtgtttcttagtagcgatgtcgctagcgaacgcagcgagttcgtgtgcagttttgttggtagcaggtttctttgctgttgtacacaaacgatatctgaaaatttgagtaaagtttgttcatcttccttcttcttcagagcagtttcagaaaccgcgaccaacgaattttctgttgcgactgatgatgtggaagacgttaagtacataagaaaacaagccgagcctttttcacgttgcgctgacccataccctcctaggtgttatcgtagcactaatttgggcgattctacaggggttcagagtcgtacgattgaagaggaaggttatatgacgggcactgcaggtaacgtcgcagtcaccgtcccgaatactccactagttagtgctgtctctccgtatatcgcagggtacaacgagaatgcacgctcgcgcgtctcattaatacgccgggtctgttgttacgccgtttgcgttttagtggtgtccgttcttataatgagcggtttattagccattatatatatatga

SEQ ID NO: 1448 - DNA, 504 bp, Citrus tristeza virus
  source 1..504: mol_type = genomic DNA
atgtcaggcagcttgggaaattcaacacacgttgatctgttgcgttccgattcccggttactatcgggatggtggagtttcatcgtgaacgtgggtgatataatcgtccggttcgcgttacacgtttctaatgaagatatgctgaatagtttttcagctatatcgaattgtacgattatagcggacggtagtgctttactaaaagataatactgtgctcgatcttttagaaggcatgaatcctttggcttatttatttaaattagcgaaaacgactactactatttgtttttctatgtctaataaggttctttttggtactactaaatccgaaccacttagttgtttagctatcacgtcggatcgagttttattcaaagttgttatgggtactaacgttgacgattctcgatgcggctgcagtatttggttttacaacaacggtacgtttcaaaatggatttatccgttgtaataatctcgtcactttgtttagcgtgacttag

SEQ ID NO: 1449 - DNA, 360 bp, Citrus tristeza virus
  source 1..360: mol_type = genomic DNA
atgagcattcggcgctcgtggtttaaggttatggctgtagttacggtattatggtacggtaatgagccttccattagtgaaggttacaatgctctcatgaatgatgactttaagtttatcgatacgcattttacaaacggttcttacgctaagaaatgttacgatttcgctaatttcgatttagactttctacgcatcgttatcattcctttgagtgggggtacggtgaatgaatcgcgtgctgatcgcactaacgtttcagaaattgtcgaatcgcatgtgagcgaccgagacaggatgagcatcttgttgcgtaataagcggatccaaattccttcgctcttaccttgcgataactag

SEQ ID NO: 1450 - DNA, 1020 bp, Barley yellow dwarf virus
  source 1..1020: mol_type = genomic DNA
atgtttttcgaaatactaataggagctagcgctaaggcggtcaaagactttattagccattgttactctagactaaaatctatatatttttcatttaaacgatggctaatggagatatctgggcaatttaaggcccatgacgcctttgtcaacatgtgctttgggcacatggctgacattgaggacttcgaggcggaactcgctgaggagttcgccgagagagaggatgaggtggaggaggcgaggagcctcttgaaactgctggtcgcccaaaaatctaaaactggggtgaccgaggcttggaccgacttctttatgaagtcgagaggtggcgtttatgcgccactttcctgcgagcctaccaggcaggagctagaagtcaagagcgagaagctcgaaaaacttctagaagaacagcaccaattcgaggtgcgagcggccaagaaatacatcaaggaaaagggccgcggcttcatcaactgctggaacgacttgcgaagtcgtctcaggttggtgaaggacgtcaaggacgaggcgaaggacaatgccagagctgctgccaagattggagcggaaatgttcgcccccgttgacgtgcaggacctctacagcttcacagaggtcaagaaggtggagaccggcctcatgaaggaggtcgtgaaggagaaaaacggcgaagaagagaaacacctcgagcccatcatggaagaggtgaggtctatcaaggacaccgccgaagccagggacgccgcctccacttggataacagagatagttaagctgaagaactcaacgcttagcgcagatgaactgtctcttgccaccatcgcccgctacgttgaaaacgtaggggataaattcaaactcgacattgcaagcaaaacatatctaaagcaagtcgcatcgatgtctgtaccaatcccaaccaacaaggacataaaattgaagatggtgctacagagtcctgaagcacgtgccaggcgggagcgcatggacgtgcttgactctgtgggtttttag

SEQ ID NO: 1451 - DNA, 603 bp, Barley yellow dwarf virus
  source 1..603: mol_type = genomic DNA
atgaattcagtaggccgtagaggacctagacgcgcaaatctaaatggcacaagaaggaggcgccgtagaacagttcggccagtggttgtggtccaacccaatcgagcaggacccaggcgacgaaatggtcgacgcaagggaagaggaggggcaaatcctgtatttagaccaacaggcgggactgaggtattcgtattctcagttgacaaccttaaagccaactcctccggggcaatcaaattcggccccagtctatcgcaatgcccagcgctttcagacggaatactcaagtcctaccatcgttacaagatcacaagtatccgagttgagtttaagtcacacgcgtccgccactacggcaggcgctatctttattgagctcgacaccgcgtgcaagcaatcagccctgggtagctacattaattccttcaccatcagcaagaccgcctccaagaccttccggtcagaggcaattaatgggaaggaattccaagaatcatcgatagaccaattctggatgctctacaaggccaatggaaccaccactgacacggcaggacaatttatcattacgatgagtgtcagtttgatgacggccaaatag

SEQ ID NO: 1452 - DNA, 1347 bp, Barley yellow dwarf virus
  source 1..1347: mol_type = genomic DNA
gtagactcctcaccaccggaaccgaaaccagcaccagaaccgacaccaaccccccagccaacgccggctccgcagcctacacctgagcccactcctgcaccagcccccaagagattctttgagtatgtcggaactccaaccggcacaatctcaactagagagaattctgacagtatctctgtcagcaaacttggtggccagtcgatgcagtacatggagaatgagaaatgtgagacaaaagtcattgactccttttggagcactaacaacaacgtttctgcccaggcagcattcgtttatccagtgccagaaggttcatacagcgtcaacatttcgtgtgaaggctttcaatccgttgaccacatcggtggcaacgaggatgggtactggattggtcttatagcctactccaattcatcaggcgacaattggggagtaggtaattatagagggtgcagtttcaaaaacttcttggcaaccaatacttggagacctggccacaaagatctcaagttgaacgattgccagttcacagatggacagatagttgaaagggacgccgtgatgtcttttcacgtagaagcaacaggcaatgatgcctgtttctatctcatggctcccaaaacaatgataactgacaaatacaactatgttgtctcatatggagggtacacaaacaagcgaatggaatttggtaccatatctgtgacatgcgatgaatccgatgttgaggctaaacacataacaaggcacgctgaaactcccatccgctccaagcacatccttgtgtccgagcgatatgtggagccattgcccaccataaccgatcaaggcttgtgtgatgtgaaaactcccgagcaagaacaaacattggtggatgaagaagacagacaaactgtttccactgaacctgatatagcactccaggaatacgaagctgccacagctgaaattcctgatgctgaagaggatgttttgccctccaaggaacagctgtcctctaagccattggacacgtctggcaatataatacctaaatccaaggaacctgaagtacttggaacataccagggtcagaacatttatcctgaagacgtacctccaatggcgcggcagagattgcgcgaagccgcgaaagcaccctccacgttgctatatgagcgaacgccgaagaagagcaacaacttcttgactcgttttatggaggcgaataggtcccctaccactcccgctgccccaacagtgtcaactacatcaaacatgacaagggaacagcttgcggagtacactagaattaggaaatcccttggactcacagcagctaaggaatacaaggcgcaatttcag

SEQ ID NO: 1453 - DNA, 756 bp, Potato leafroll virus
  source 1..756: mol_type = genomic DNA
atgcctaagcgtgatgctcaatggcgccacatggcaggtacgtcaaaaattagccgttcggctaatttctctcctcgtgggggaaatgggcctaaatacaacaaggccgctgaatgggttaacaggcctatgtataggaagcccaggatatatcgaactatacgaggccctgatgttccacggggctgtgaaggcccgtgcaaggttcagtcttatgaacaaagacatgatgtgtcacatgttgggaaggttatgtgtatatctgatgtaacaagaggtaatggtattacccatcgtgtaggaaaacgtttttgtgttaagtctgtttatattttaggtaagatatggatggacgagaatatcaagttgaagaatcacacgaacagtgtgatgttttggttagtcagagatcgtagaccgtatagttctcctatggactttggtcaagtttttaatatgttcgacaatgaacccagtactgctactgttaagaacgatcttcgtgatcgttttcaagttatgcataaattctatggaaaggtgacaggtggacaatatgctagcaacgaacaggcattggtcaaacgtttttggaaggtgaataattatgtagtctacaaccatcaagaagcagggaagtacgagaatcatactgagaacgcattattattgtatatggcatgtactcatgcctcaaatcccgtgtatgctactctgaaaattcggatctatttttatgattcgatcaccaattaa

SEQ ID NO: 1454 - DNA, 759 bp, Potato leafroll virus
  source 1..759: mol_type = genomic DNA
atgtataattcgcgaaacaaacgtggttttactacttcgagacgaagccattcacggtatcccgtgtctaggcgttcgtatagtgtgaatagaatcattggcaaacgtggatcgaatattcatagaaaggcccacgatgatgttaaaatgtcagcccaacgtttacatgagaatcaatttgggcctgactttgttatggcccataattcagctatttcgacttttattactttcccttctcttggtaaggttgaaccgaatcgatcaaggggttttattaagttaaaacgtttacgttttaagggtactgtgaaaatagaacgagttttgaatatggatggttcaactcctaagattgaaggcgtattttccatggttgttgttgttgaccgaaaacctcatttgggatcttctggatgtctacatacatttgatgaattgtttggtgcaaggattcatagtcatggtaatttagccattactgccacgttgaaagaccgtttctatattcgtcatgtatacaagcgtgtgctttcagtggagaaggatagcatgatggttgacgttgaaggaagcatatacttgtctaataggcgatttaattgttgggctacctttaaggataatgaacgtgactcttgtaatggcgtttatgctaacataagcaagaatgcccttttagtgtattattgttggatgtcggatgctatgtccaaggcatctacatttgtgtcatttgatcttgattatgttggatga

SEQ ID NO: 1455 - DNA, 882 bp, Potato leafroll virus
  source 1..882: mol_type = genomic DNA
atggagtctcaattagttaatccaccaacagcgttcaattatgtcgaatctcaccgtgatgaatatcaattgtctcatgacttgaatgagatagtattgcaatttccatcaacaacagctcaattaagcgccagattaagtcgtagctgtatgaagatagatcattgcgtcattgaatacaggcaacaagttcctatcaatgcaacaggaactgttattgtggagattcacgataaacgaatgacggataacgagtcattacaagcatcgtggacatatcccataagatgtaacatagatctccactttttttcatcttcattcttctcccttaaagacccaattccttggaaattgtattacagagtcagcgacacaaatgttcatcaaagaacacactttgcgaaatttaaggggaaactgaagatatccactgcgaaacattcagtggatattcctttcaagcccccaactgtaaaaatattatcgacacaattcaccgagaaagatgtggatttctcccacgttggctatggaaaatgggagaggaaattgataaggtccgcatcaacatcaagatatgggcttcgcagcccaatttcattaaaacccggtgagacatgggcaacaagaagtacaattggaaccggtacgtcagatgcggactctgaattagacaacgcaatacatccatatagacaacttcatagattggacacaagtatactagaccctggagaatcggcgtctataataggagcaagaagaaccgagtcaagtatcaccctttcaatggcccaattaaacgaattggttaagactgcggcccaagaatgtattaacaataactgtactcctgctcaaccaaagtcgttgaaataa

SEQ ID NO: 1456 - DNA, 756 bp, Bean golden mosaic virus; identical to SEQ ID NO: 1453
  source 1..756: mol_type = genomic DNA

SEQ ID NO: 1457 - DNA, 258 bp, Bean golden mosaic virus
  source 1..258: mol_type = genomic DNA
atggggaaccacatctgcatgctcttatccaattcgaaggcaagttccagtgcacgaattgcagagtgttcgacctcaaacacccaacaacctcttccgtctcccatgccaatatacagagtgcaaaatcatcctctgatgtcaagtcctacatcgagaaggacggtgattacatcgaatggggtcattttcaagtcgacggaagatctgctagaggaggtcaacagacagctaatgatgcggcatccgaagcattga

SEQ ID NO: 1458 - DNA, 1086 bp, Bean golden mosaic virus
  source 1..1086: mol_type = genomic DNA
atgccaccaccaaagcgttttaaaataaacgcaaagaattatttcctcacatacccacaatgttcaattacaaaagagagtgcaattgaacaacttcaaaacctacaaacaacggtgaacaagaaatacatcagaatttgcagagaaattcacgataatggggaaccacatctgcatgctcttatccaattcgaaggcaagttccagtgcacgaattgcagagtgttcgacctcaaacacccaacaacctcttccgtctcccatgccaatatacagagtgcaaaatcatcctctgatgtcaagtcctacatcgagaaggacggtgattacatcgaatggggtcattttcaagtcgacggaagatctgctagaggaggtcaacagacagctaatgatgcggcatccgaagcattgaatgcttcttcaaaggaagaagccatgcaaataataaaagagaaactgccggaaaagtttctcttccaatatcacaacttatccagtaacctggatagaatattcacaaaggctccggatccgtggtcacctccgtttcacctctcctctttcactaacgtgccaagaaagatgcaagaatgggcggatgattatttcgggagaggtgccgctgcgcggccggagagacctattagtatcatcgtcgaaggtgattcacgaacgggaaagacaatgtgggcacgtgcattagggacccacaattatctaagtggtcacctggatttcaactcaaaggtgttttcaaatcatgctgagtataacgtcattgatgacatcgcaccgcactatctaaagttaaagcactggaaggaattgatgggagctcaaaaggactggcaatcaaactgcaaatacgggaaacccgttcaaattaaaggtggaatcccatcaatcgtgctttgcaatccaggtgaaggagcgagttataaatgtttcctcgacaaagaggaaaacgcagctctcaaacactggacaatacataatgcgaaattcatcttcctcgactcccccctctatcaaagttcaacacagagctgcgaagaaacgagcaatcagacgacgtcgcgttga

SEQ ID NO: 1459 - DNA, 390 bp, Bean golden mosaic virus
  source 1..390: mol_type = genomic DNA
atgcgaaattcatcttcctcgactcccccctctatcaaagttcaacacagagctgcgaagaaacgagcaatcagacgacgtcgcgttgatttagagtgcggctgcacaatttacgtacacataaattgctacggtcatggattcacgcacaggggaacgcatcactgcacgtcaagcggagaatggcgtgtatatctgggagatatcaaatcccctctatttcaagatgtacaacgtagaagatctacaatacacaacgaccagagtataccacctccaaatacggttcaaccacaacctcaggaacaaactggatctacacaaggctttcctgaatttccaagtctggacgatatctcttcaagcttctgggacgacatatttaaatag

SEQ ID NO: 1460 - DNA, 399 bp, Bean golden mosaic virus
  source 1..399: mol_type = genomic DNA
atggattcacgcacaggggaacgcatcactgcacgtcaagcggagaatggcgtgtatatctgggagatatcaaatcccctctatttcaagatgtacaacgtagaagatctacaatacacaacgaccagagtataccacctccaaatacggttcaaccacaacctcaggaacaaactggatctacacaaggctttcctgaatttccaagtctggacgatatctcttcaagcttctgggacgacatatttaaatagatttaaatatttagtgctcttgtatttagacagaataggtgtcatttcgcttaacaatgtaatcagagctgtacgtttcgcaacagacaaatcatatgtaaattatgtacttgagaatcatgaaataaaatataaattttattaa

SEQ ID NO: 1461 - DNA, 276 bp, synthetic construct
  source 1..276: mol_type = other DNA
atgggaatgtcgaataggtcagtttctacatccatttttttccttgcattggtggttttgcatggaattcaggacacagaagagagacatttgaaaactacttcgttagagattgagggaatttataaaaaaactgaggccgagcatcctagcattgtggtcacatatacacggcgtggtgtccttcagaaggaggtcattgcccaccccacagactttaggccaacaaatcccggaaacagcccaggcgttggacactctaacgggcgacattga

SEQ ID NO: 1462 - DNA, 291 bp, synthetic construct
  source 1..291: mol_type = other DNA
atggattcgaagagttttctgctactactactactcttctgcttcttgttccttcatgatgcttctgatctcactcaagctcatgctcacgttcaaggactttccaaccgcaagatgatgatgatgaaaatggaaagtgaatgggttggagcaaatggagaagcagagaaggcaaagacgaagggtttaggactacatgaagagttaaggactgttccttcgggacctgacccgttgcaccatcatgtgaacccaccaagacagccaagaaacaactttcagctcccttga

SEQ ID NO: 1463 - DNA, 234 bp, synthetic construct
  source 1..234: mol_type = other DNA
atggctccgtgtcgtacgatgatggttctgctctgttttgttctgtttctcgcggcgagtagttcttgtgtagcggctgcaagaattggagccaccatggagatgaagaagaatataaagagattaacgtttaaaaacagccatatttttggttacttacctaaaggcgttcccattcctccttctgctccttctaagagacacaactcttttgttaactctcttcctcattga

SEQ ID NO: 1464 - DNA, 264 bp, synthetic construct
  source 1..264: mol_type = other DNA
atgatgaagacgaaaagtgaagtgttgatctttttcttcactctagtattgcttttaagcatggcttcaagtgttattttaagagaagatggttttgctcctcctaaaccatctcccaccacacatgagaaagcaagtactaaaggtgacagagatggagtagagtgcaagaattcagacagtgaagaagaatgtcttgtgaagaaaacagtagctgctcacaccgattacatctatacacaagatttaaacctatctccttga

SEQ ID NO: 1465 - DNA, 228 bp, synthetic construct
  source 1..228: mol_type = other DNA
atgacttttgtagttcgtcttcttgtgtgtctcttattgacgcttacaattacatcttctctagcccgcaaccctgtttccgtttcaggtgggtttgagaattctggattccaaaggagtttgttgatggtgaacgttgaggactacggtgacccatctgcaaatcctaagcacgaccccggcgttcctccgtcagcaaccggccaacgtgtcgtcggcagaggctga

SEQ ID NO: 1466 - DNA, 280 bp, synthetic construct
  source 1..280: mol_type = other DNA
aaaacacacaagtttactcttttctgttcatatacgtacatcaagccaaggagaaaaaaggaaggcgagatggtgtccataagggttatttgctatcttttagtattttccgttttgcaggtgcatgctaaagtctccaatgcaaactttaatagccaagctccacaaatgaaaaatagtgaaggtcttggagcaagcaatggtacccaaattgccaagaagcatgctgaagatgtaattgaaaaccgaaagacgttgaagcatgtaaatgtgaaggtgg

SEQ ID NO: 1467 - DNA, 217 bp, synthetic construct
  source 1..217: mol_type = other DNA
gagatacctacagcgtgagctatgagaaagcgccacgcttcccgaagggagaaaggcggacaggtatccggtaagcggcagggtcggaacaggagagcgcacgagggagcttccagggggaaacgcctggtatctttatagtcctgtcgggtttcgccacctctgacttgagcgtcgatttttgtgatgctcgtcaggggggcggagcctatggaaa

SEQ ID NO: 1468 - DNA, 158 bp, synthetic construct
  source 1..158: mol_type = other DNA
aacgccagcaacgcggcctttttacggttcctggccttttgctggccttttgctcacatgttctttcctgcgttatcccctgattctgtggataaccgtattaccgcctttgagtgagctgataccgctcgccgcagccgaacgaccgagcgcagcga

SEQ ID NO: 1469 - DNA, 20 bp, synthetic construct
  source 1..20: mol_type = other DNA
aaatgcagcatttcggtaaa

SEQ ID NO: 1470 - skipped

SEQ ID NO: 1471 - DNA, 107 bp, synthetic construct
  source 1..107: mol_type = other DNA
aaacggaggcgcagcaccattaagattcacatggaaattgataaataccctaaattagggttttgatatgtatatgagaatcttgatgatgctgcatcaacccgttt

SEQ ID NO: 1472 - skipped

SEQ ID NO: 1473 - DNA, 20 bp, synthetic construct
  source 1..20: mol_type = other DNA
tttaccgaaatgctgcattt

SEQ ID NO: 1474 - DNA, 129 bp, synthetic construct
  source 1..129: mol_type = other DNA
gtcagtgagcgaggaagcggaagagcgcccaatacgcaaaccgcctctccccgcgcgttggccgattcattaatgcagctggcacgacaggtttcccgactggaaagcgggcagtgagcgcaacgcaat

SEQ ID NO: 1475 - DNA, 22 bp, synthetic construct
  source 1..22: mol_type = other DNA
taatgtgagttagctcactcat

SEQ ID NO: 1476 - DNA, 14 bp, synthetic construct
  source 1..14: mol_type = other DNA
taggcaccccaggc

SEQ ID NO: 1477 - DNA, 31 bp, synthetic construct
  source 1..31: mol_type = other DNA
tttacactttatgcttccggctcgtatgttg

SEQ ID NO: 1478 - DNA, 43 bp, synthetic construct
  source 1..43: mol_type = other DNA
tgtggaattgtgagcggataacaatttcacacaggaaacagct

SEQ ID NO: 1479 - DNA, 324 bp, synthetic construct
  source 1..324: mol_type = other DNA
atgaccatgattacgccaagcttgcatgcctgcaggtcgactctagaggatccccgggtaccgagctcgaattcactggccgtcgttttacaacgtcgtgactgggaaaaccctggcgttacccaacttaatcgccttgcagcacatccccctttcgccagctggcgtaatagcgaagaggcccgcaccgatcgcccttcccaacagttgcgcagcctgaatggcgaatggcgcctgatgcggtattttctccttacgcatctgtgcggtatttcacaccgcatatggtgcactctcagtacaatctgctctgatgccgcatag

SEQ ID NO: 1480 - DNA, 240 bp, synthetic construct
  source 1..240: mol_type = other DNA
ttaagccagccccgacacccgccaacacccgctgacgcgccctgacgggcttgtctgctcccggcatccgcttacagacaagctgtgaccgtctccgggagctgcatgtgtcagaggttttcaccgtcatcaccgaaacgcgcgagacgaaagggcctcgtgatacgcctatttttataggttaatgtcatgataataatggtttcttagacgtcaggtggcacttttcggggaaatgtg

SEQ ID NO: 1481 - DNA, 105 bp, synthetic construct
  source 1..105: mol_type = other DNA
cgcggaacccctatttgtttatttttctaaatacattcaaatatgtatccgctcatgagacaataaccctgataaatgcttcaataatattgaaaaaggaagagt

SEQ ID NO: 1482 - DNA, 861 bp, synthetic construct
  source 1..861: mol_type = other DNA
atgagtattcaacatttccgtgtcgcccttattcccttttttgcggcattttgccttcctgtttttgctcacccagaaacgctggtgaaagtaaaagatgctgaagatcagttgggtgcacgagtgggttacatcgaactggatctcaacagcggtaagatccttgagagttttcgccccgaagaacgttttccaatgatgagcacttttaaagttctgctatgtggcgcggtattatcccgtattgacgccgggcaagagcaactcggtcgccgcatacactattctcagaatgacttggttgagtactcaccagtcacagaaaagcatcttacggatggcatgacagtaagagaattatgcagtgctgccataaccatgagtgataacactgcggccaacttacttctgacaacgatcggaggaccgaaggagctaaccgcttttttgcacaacatgggggatcatgtaactcgccttgatcgttgggaaccggagctgaatgaagccataccaaacgacgagcgtgacaccacgatgcctgtagcaatggcaacaacgttgcgcaaactattaactggcgaactacttactctagcttcccggcaacaattaatagactggatggaggcggataaagttgcaggaccacttctgcgctcggcccttccggctggctggtttattgctgataaatctggagccggtgagcgtgggtctcgcggtatcattgcagcactggggccagatggtaagccctcccgtatcgtagttatctacacgacggggagtcaggcaactatggatgaacgaaatagacagatcgctgagataggtgcctcactgattaagcattggtaa

SEQ ID NO: 1483 - DNA, 170 bp, synthetic construct
  source 1..170: mol_type = other DNA
ctgtcagaccaagtttactcatatatactttagattgatttaaaacttcatttttaatttaaaaggatctaggtgaagatcctttttgataatctcatgaccaaaatcccttaacgtgagttttcgttccactgagcgtcagaccccgtagaaaagatcaaaggatcttc

SEQ ID NO: 1484 - DNA, 372 bp, synthetic construct
  source 1..372: mol_type = other DNA
ttgagatcctttttttctgcgcgtaatctgctgcttgcaaacaaaaaaaccaccgctaccagcggtggtttgtttgccggatcaagagctaccaactctttttccgaaggtaactggcttcagcagagcgcagataccaaatactgttcttctagtgtagccgtagttaggccaccacttcaagaactctgtagcaccgcctacatacctcgctctgctaatcctgttaccagtggctgctgccagtggcgataagtcgtgtcttaccgggttggactcaagacgatagttaccggataaggcgcagcggtcgggctgaacggggggttcgtgcacacagcccagcttggagcgaacgacctacaccgaact

SEQ ID NO: 1485 - DNA, 20 bp, synthetic construct
  source 1..20: mol_type = other DNA
taaacgctcttttctcttag

SEQ ID NO: 1486 - DNA, 25 bp, synthetic construct
  source 1..25: mol_type = other DNA
gtttacccgccaatatatcctgtca

SEQ ID NO: 1487 - DNA, 285 bp, synthetic construct
  source 1..285: mol_type = other DNA
aacactgatagtttaaactgaaggcgggaaacgacaatctgatccaagctcaagctgctctagcattcgccattcaggctgcgcaactgttgggaagggcgatcggtgcgggcctcttcgctattacgccagctggcgaaagggggatgtgctgcaaggcgattaagttgggtaacgccagggttttcccagtcacgacgttgtaaaacgacggccagtgccaagcttagtaattcatccaggtcaccaagttctaggattttcagaactgcaacttattttatc

SEQ ID NO: 1488 - DNA, 377 bp, synthetic construct
  source 1..377: mol_type = other DNA
aaggaatctttaaacatacgaacagatcacttaaagttcttctgaagcaacttaaagttatcaggcatgcatggatcttggaggaatcagatgtgcagtcagggaccatagcacaagacaggcgtcttctactggtgctaccagcaaatgctggaagccgggaacactgggtacgttggaaaccacgtgatgtgaagaagtaagataaactgtaggagaaaagcatttcgtagtgggccatgaagcctttcaggacatgtattgcagtatgggccggcccattacgcaattggacgacaacaaagactagtattagtaccacctcggctatccacatagatcaaagctgatttaaaagagttgtgcagatgatccgt

SEQ ID NO: 1489 - skipped

SEQ ID NO: 1490 - DNA, 20 bp, synthetic construct
  source 1..20: mol_type = other DNA
aaatgcagcatttcggtaaa

SEQ ID NO: 1491 - DNA, 76 bp, synthetic construct
  source 1..76: mol_type = other DNA
gttttagagctagaaatagcaagttaaaataaggctagtccgttatcaacttgaaaaagtggcaccgagtcggtgc

SEQ ID NO: 1492 - DNA, 303 bp, synthetic construct
  source 1..303: mol_type = other DNA
ttttttttttcgttttgcattgagttttctccgtcgcatgtttgcagttttattttccgttttgcattgaaatttctccgtctcatgtttgcagcgtgttcaaaaagtacgcagctgtatttcacttatttacggcgccacattttcatgccgtttgtgccaactatcccgagctagtgaatacagcttggcttcacacaacactggtgacccgctgacctgctcgtacctcgtaccgtcgtacggcacagcatttggaattaaagggtgtgatcgatactgcttgctgctaagcttgcatgc

SEQ ID NO: 1493 - DNA, 1992 bp, synthetic construct
  source 1..1992: mol_type = other DNA
ctgcagtgcagcgtgacccggtcgtgcccctctctagagataatgagcattgcatgtctaagttataaaaaattaccacatattttttttgtcacacttgtttgaagtgcagtttatctatctttatacatatatttaaactttactctacgaataatataatctatagtactacaataatatcagtgttttagagaatcatataaatgaacagttagacatggtctaaaggacaattgagtattttgacaacaggactctacagttttatctttttagtgtgcatgtgttctcctttttttttgcaaatagcttcacctatataatacttcatccattttattagtacatccatttagggtttagggttaatggtttttatagactaatttttttagtacatctattttattctattttagcctctaaattaagaaaactaaaactctattttagtttttttatttaataatttagatataaaatagaataaaataaagtgactaaaaattaaacaaataccctttaagaaattaaaaaaactaaggaaacatttttcttgtttcgagtagataatgccagcctgttaaacgccgtcgacgagtctaacggacaccaaccagcgaaccagcagcgtcgcgtcgggccaagcgaagcagacggcacggcatctctgtcgctgcctctggacccctctcgagagttccgctccaccgttggacttgctccgctgtcggcatccagaaattgcgtggcggagcggcagacgtgagccggcacggcaggcggcctcctcctcctctcacggcacggcagctacgggggattcctttcccaccgctccttcgctttcccttcctcgcccgccgtaataaatagacaccccctccacaccctctttccccaacctcgtgttgttcggagcgcacacacacacaaccagatctcccccaaatccacccgtcggcacctccgcttcaaggtacgccgctcgtcctccccccccccccctctctaccttctctagatcggcgttccggtccatggttagggcccggtagttctacttctgttcatgtttgtgttagatccgtgtttgtgttagatccgtgctgctagcgttcgtacacggatgcgacctgtacgtcagacacgttctgattgctaacttgccagtgtttctctttggggaatcctgggatggctctagccgttccgcagacgggatcgatttcatgattttttttgtttcgttgcatagggtttggtttgcccttttcctttatttcaatatatgccgtgcacttgtttgtcgggtcatcttttcatgcttttttttgtcttggttgtgatgatgtggtctggttgggcggtcgttctagatcggagtagaattctgtttcaaactacctggtggatttattaattttggatctgtatgtgtgtgccatacatattcatagttacgaattgaagatgatggatggaaatatcgatctaggataggtatacatgttgatgcgggttttactgatgcatatacagagatgctttttgttcgcttggttgtgatgatgtggtgtggttgggcggtcgttcattcgttctagatcggagtagaatactgtttcaaactacctggtgtatttattaattttggaactgtatgtgtgtgtcatacatcttcatagttacgagtttaagatggatggaaatatcgatctaggataggtatacatgttgatgtgggttttactgatgcatatacatgatggcatatgcagcatctattcatatgctctaaccttgagtacctatctattataataaacaagtatgttttataattattttgatcttgatatacttggatgatggcatatgcagcagctatatgtggatttttttagccctgccttcatacgctatttatttgcttggtactgtttcttttgtcgatgctcaccctgttgtttggtgttacttctgcag

SEQ ID NO: 1494 - DNA, 18 bp, synthetic construct
  source 1..18: mol_type = other DNA
ccctaggcctactagatg

SEQ ID NO: 1495 - DNA, 66 bp, synthetic construct
  source 1..66: mol_type = other DNA
gattacaaggaccacgacggggattacaaggaccacgacattgattacaaggatgatgatgacaag

SEQ ID NO: 1496 - skipped

SEQ ID NO: 1497 - DNA, 21 bp, synthetic construct
  source 1..21: mol_type = other DNA
ccgaagaagaagaggaaggtt

SEQ ID NO: 1498 - DNA, 24 bp, synthetic construct
  source 1..24: mol_type = other DNA
ggcatccacggggtgccagctgct

SEQ ID NO: 1499 - DNA, 4101 bp, synthetic construct
  source 1..4101: mol_type = other DNA
gacaagaagtactcgatcggcctcgatattgggactaactctgttggctgggccgtgatcaccgacgagtacaaggtgccctcaaagaagttcaaggtcctgggcaacaccgatcggcattccatcaagaagaatctcattggcgctctcctgttcgacagcggcgagacggctgaggctacgcggctcaagcgcaccgcccgcaggcggtacacgcgcaggaagaatcgcatctgctacctgcaggagattttctccaacgagatggcgaaggttgacgattctttcttccacaggctggaggagtcattcctcgtggaggaggataagaagcacgagcggcatccaatcttcggcaacattgtcgacgaggttgcctaccacgagaagtaccctacgatctaccatctgcggaagaagctcgtggactccacagataaggcggacctccgcctgatctacctcgctctggcccacatgattaagttcaggggccatttcctgatcgagggggatctcaacccggacaatagcgatgttgacaagctgttcatccagctcgtgcagacgtacaaccagctcttcgaggagaaccccattaatgcgtcaggcgtcgacgcgaaggctatcctgtccgctaggctctcgaagtctcggcgcctcgagaacctgatcgcccagctgccgggcgagaagaagaacggcctgttcgggaatctcattgcgctcagcctggggctcacgcccaacttcaagtcgaatttcgatctcgctgaggacgccaagctgcagctctccaaggacacatacgacgatgacctggataacctcctggcccagatcggcgatcagtacgcggacctgttcctcgctgccaagaatctgtcggacgccatcctcctgtctgatattctcagggtgaacaccgagattacgaaggctccgctctcagcctccatgatcaagcgctacgacgagcaccatcaggatctgaccctcctgaaggcgctggtcaggcagcagctccccgagaagtacaaggagatcttcttcgatcagtcgaagaacggctacgctgggtacattgacggcggggcctctcaggaggagttctacaagttcatcaagccgattctggagaagatggacggcacggaggagctgctggtgaagctcaatcgcgaggacctcctgaggaagcagcggacattcgataacggcagcatcccacaccagattcatctcggggagctgcacgctatcctgaggaggcaggaggacttctaccctttcctcaaggataaccgcgagaagatcgagaagattctgactttcaggatcccgtactacgtcggcccactcgctaggggcaactcccgcttcgcttggatgacccgcaagtcagaggagacgatcacgccgtggaacttcgaggaggtggtcgacaagggcgctagcgctcagtcgttcatcgagaggatgacgaatttcgacaagaacctgccaaatgagaaggtgctccctaagcactcgctcctgtacgagtacttcacagtctacaacgagctgactaaggtgaagtatgtgaccgagggcatgaggaagccggctttcctgtctggggagcagaagaaggccatcgtggacctcctgttcaagaccaaccggaaggtcacggttaagcagctcaaggaggactacttcaagaagattgagtgcttcgattcggtcgagatctctggcgttgaggaccgcttcaacgcctccctggggacctaccacgatctcctgaagatcattaaggataaggacttcctggacaacgaggagaatgaggatatcctcgaggacattgtgctgacactcactctgttcgaggaccgggagatgatcgaggagcgcctgaagacttacgcccatctcttcgatgacaaggtcatgaagcagctcaagaggaggaggtacaccggctgggggaggctgagcaggaagctcatcaacggcattcgggacaagcagtccgggaagacgatcctcgacttcctgaagagcgatggcttcgcgaaccgcaatttcatgcagctgattcacgatgacagcctcacattcaaggaggatatccagaaggctcaggtgagcggccagggggactcgctgcacgagcatatcgcgaacctcgctggctcgccagctatcaagaaggggattctgcagaccgtgaaggttgtggacgagctggtgaaggtcatgggcaggcacaagcctgagaacatcgtcattgagatggcccgggagaatcagaccacgcagaagggccagaagaactcacgcgagaggatgaagaggatcgaggagggcattaaggagctggggtcccagatcctcaaggagcacccggtggagaacacgcagctgcagaatgagaagctctacctgtactacctccagaatggccgcgatatgtatgtggaccaggagctggatattaacaggctcagcgattacgacgtcgatcatatcgttccacagtcattcctgaaggatgactccattgacaacaaggtcctcaccaggtcggacaagaaccggggcaagtctgataatgttccttcagaggaggtcgttaagaagatgaagaactactggcgccagctcctgaatgccaagctgatcacgcagcggaagttcgataacctcacaaaggctgagaggggcgggctctctgagctggacaaggcgggcttcatcaagaggcagctggtcgagacacggcagatcactaagcacgttgcgcagattctcgactcacggatgaacactaagtacgatgagaatgacaagctgatccgcgaggtgaaggtcatcaccctgaagtcaaagctcgtctccgacttcaggaaggatttccagttctacaaggttcgggagatcaacaattaccaccatgcccatgacgcgtacctgaacgcggtggtcggcacagctctgatcaagaagtacccaaagctcgagagcgagttcgtgtacggggactacaaggtttacgatgtgaggaagatgatcgccaagtcggagcaggagattggcaaggctaccgccaagtacttcttctactctaacattatgaatttcttcaagacagagatcactctggccaatggcgagatccggaagcgccccctcatcgagacgaacggcgagacgggggagatcgtgtgggacaagggcagggatttcgcgaccgtcaggaaggttctctccatgccacaagtgaatatcgtcaagaagacagaggtccagactggcgggttctctaaggagtcaattctgcctaagcggaacagcgacaagctcatcgcccgcaagaaggactgggatccgaagaagtacggcgggttcgacagccccactgtggcctactcggtcctggttgtggcgaaggttgagaagggcaagtccaagaagctcaagagcgtgaaggagctgctggggatcacgattatggagcgctccagcttcgagaagaacccgatcgatttcctggaggcgaagggctacaaggaggtgaagaaggacctgatcattaagctccccaagtactcactcttcgagctggagaacggcaggaagcggatgctggcttccgctggcgagctgcagaaggggaacgagctggctctgccgtccaagtatgtgaacttcctctacctggcctcccactacgagaagctcaagggcagccccgaggacaacgagcagaagcagctgttcgtcgagcagcacaagcattacctcgacgagatcattgagcagatttccgagttctccaagcgcgtgatcctggccgacgcgaatctggataaggtcctctccgcgtacaacaagcaccgcgacaagccaatcagggagcaggctgagaatatcattcatctcttcaccctgacgaacctcggcgcccctgctgctttcaagtacttcgacacaactatcgatcgcaagaggtacacaagcactaaggaggtcctggacgcgaccctcatccaccagtcgattaccggcctctacgagacgcgcatcgacctgtctcagctcgggggcgac

SEQ ID NO: 1500 - DNA, 48 bp, synthetic construct
  source 1..48: mol_type = other DNA
aagcggccagcggcgacgaagaaggcggggcaggcgaagaagaagaag

SEQ ID NO: 1501 - DNA, 681 bp, synthetic construct
  source 1..681: mol_type = other DNA
tgagctcagagctttcgttcgtatcatcggtttcgacaacgttcgtcaagttcaatgcatcagtttcattgcgcacacaccagaatcctactgagtttgagtattatggcattgggaaaactgtttttcttgtaccatttgttgtgcttgtaatttactgtgttttttattcggttttcgctatcgaactgtgaaatggaaatggatggagaagagttaatgaatgatatggtccttttgttcattctcaaattaatattatttgttttttctcttatttgttgtgtgttgaatttgaaattataagagatatgcaaacattttgttttgagtaaaaatgtgtcaaatcgtggcctctaatgaccgaagttaatatgaggagtaaaacacttgtagttgtaccattatgcttattcactaggcaacaaatatattttcagacctagaaaagctgcaaatgttactgaatacaagtatgtcctcttgtgttttagacatttatgaactttcctttatgtaattttccagaatccttgtcagattctaatcattgctttataattatagttatactcatggatttgtagttgagtatgaaaatattttttaatgcattttatgacttgccaattgattgacaacgaattcgtaatcatggtcatagctgtttcctgtgtgaaa

SEQ ID NO: 1502 - DNA, 17 bp, synthetic construct
  source 1..17: mol_type = other DNA
ttgttatccgctcacaa

SEQ ID NO: 1503 - skipped

SEQ ID NO: 1504 - DNA, 31 bp, synthetic construct
  source 1..31: mol_type = other DNA
caacatacgagccggaagcataaagtgtaaa

SEQ ID NO: 1505 - DNA, 14 bp, synthetic construct
  source 1..14: mol_type = other DNA
gcctggggtgccta

SEQ ID NO: 1506 - DNA, 22 bp, synthetic construct
  source 1..22: mol_type = other DNA
atgagtgagctaactcacatta

SEQ ID NO: 1507 - DNA, 190 bp, synthetic construct
  source 1..190: mol_type = other DNA
attgcgttgcgctcactgcccgctttccagtcgggaaacctgtcgtgccagctgcattaatgaatcggccaacgcgcggggagaggcggtttgcgtattggctagagcagcttgccaacatggtggagcacgacactctcgtctactccaagaatatcaaagatacagtctcagaagaccaaagggctat

SEQ ID NO: 1508 - DNA, 678 bp, synthetic construct
  source 1..678: mol_type = other DNA
tgagacttttcaacaaagggtaatatcgggaaacctcctcggattccattgcccagctatctgtcacttcatcaaaaggacagtagaaaaggaaggtggcacctacaaatgccatcattgcgataaaggaaaggctatcgttcaagatgcctctgccgacagtggtcccaaagatggacccccacccacgaggagcatcgtggaaaaagaagacgttccaaccacgtcttcaaagcaagtggattgatgtgataacatggtggagcacgacactctcgtctactccaagaatatcaaagatacagtctcagaagaccaaagggctattgagacttttcaacaaagggtaatatcgggaaacctcctcggattccattgcccagctatctgtcacttcatcaaaaggacagtagaaaaggaaggtggcacctacaaatgccatcattgcgataaaggaaaggctatcgttcaagatgcctctgccgacagtggtcccaaagatggacccccacccacgaggagcatcgtggaaaaagaagacgttccaaccacgtcttcaaagcaagtggattgatgtgatatctccactgacgtaagggatgacgcacaatcccactatccttcgcaagaccttcctctatataaggaagttcatttcatttggagaggacacgctga

SEQ ID NO: 1509 - DNA, 44 bp, synthetic construct
  source 1..44: mol_type = other DNA
aatcaccagtctctctctacaaatctatctctctcgagtctacc

SEQ ID NO: 1510 - DNA, 552 bp, synthetic construct
  source 1..552: mol_type = other DNA
atgagcccagaacgacgcccggccgacatccgccgtgccaccgaggcggacatgccggcggtctgcaccatcgtcaaccactacatcgagacaagcacggtcaacttccgtaccgagccgcaggaaccgcaggagtggacggacgacctcgtccgtctgcgggagcgctatccctggctcgtcgccgaggtggacggcgaggtcgccggcatcgcctacgcgggcccctggaaggcacgcaacgcctacgactggacggccgagtcgaccgtgtacgtctccccccgccaccagcggacgggactgggctccacgctctacacccacctgctgaagtccctggaggcacagggcttcaagagcgtggtcgctgtcatcgggctgcccaacgacccgagcgtgcgcatgcacgaggcgctcggatatgccccccgcggcatgctgcgggcggccggcttcaagcacgggaactggcatgacgtgggtttctggcagctggacttcagcctgccggtaccgccccgtccggtcctgcccgtcaccgagatttga

SEQ ID NO: 1511 - skipped

SEQ ID NO: 1512 - DNA, 175 bp, synthetic construct
  source 1..175: mol_type = other DNA
tttctccataataatgtgtgagtagttcccagataagggaattagggttcctatagggtttcgctcatgtgttgagcatataagaaacccttagtatgtatttgtatttgtaaaatacttctatcaataaaatttctaattcctaaaaccaaaatccagtactaaaatccagatc

SEQ ID NO: 1513 - DNA, 77 bp, synthetic construct
  source 1..77: mol_type = other DNA
ccccgaattaattcggcgttaattcagtacattaaaaacgtccgcaatgtgttattaagttgtctaagcgtcaattt

SEQ ID NO: 1514 - DNA, 25 bp, synthetic construct
  source 1..25: mol_type = other DNA
gtttacaccacaatatatcctgcca

SEQ ID NO: 1515 - DNA, 424 bp, synthetic construct
  source 1..424: mol_type = other DNA
ccagccagccaacagctccccgaccggcagctcggcacaaaatcaccactcgatacaggcagcccatcagtccgggacggcgtcagcgggagagccgttgtaaggcggcagactttgctcatgttaccgatgctattcggaagaacggcaactaagctgccgggtttgaaacacggatgatctcgcggagggtagcatgttgattgtaacgatgacagagcgttgctgcctgtgatcaccgcggtttcaaaatcggctccgtcgatactatgttatacgccaactttgaaaacaactttgaaaaagctgttttctggtatttaaggttttagaatgcaaggaacagtgaattggagttcgtcttgttataattagcttcttggggtatctttaaatactgtagaaaagaggaaggaaataataa

SEQ ID NO: 1516 - DNA, 795 bp, synthetic construct
  source 1..795: mol_type = other DNA
atggctaaaatgagaatatcaccggaattgaaaaaactgatcgaaaaataccgctgcgtaaaagatacggaaggaatgtctcctgctaaggtatataagctggtgggagaaaatgaaaacctatatttaaaaatgacggacagccggtataaagggaccacctatgatgtggaacgggaaaaggacatgatgctatggctggaaggaaagctgcctgttccaaaggtcctgcactttgaacggcatgatggctggagcaatctgctcatgagtgaggccgatggcgtcctttgctcggaagagtatgaagatgaacaaagccctgaaaagattatcgagctgtatgcggagtgcatcaggctctttcactccatcgacatatcggattgtccctatacgaatagcttagacagccgcttagccgaattggattacttactgaataacgatctggccgatgtggattgcgaaaactgggaagaagacactccatttaaagatccgcgcgagctgtatgattttttaaagacggaaaagcccgaagaggaacttgtcttttcccacggcgacctgggagacagcaacatctttgtgaaagatggcaaagtaagtggctttattgatcttgggagaagcggcagggcggacaagtggtatgacattgccttctgcgtccggtcgatcagggaggatatcggggaagaacagtatgtcgagctattttttgacttactggggatcaagcctgattgggagaaaataaaatattatattttactggatgaattgttttag

SEQ ID NO: 1517 - DNA, 86 bp, synthetic construct
  source 1..86: mol_type = other DNA
tacctagaatgcatgaccaaaatcccttaacgtgagttttcgttccactgagcgtcagaccccgtagaaaagatcaaaggatcttc

SEQ ID NO: 1518 - DNA, 589 bp, synthetic construct
  source 1..589: mol_type = other DNA
ttgagatcctttttttctgcgcgtaatctgctgcttgcaaacaaaaaaaccaccgctaccagcggtggtttgtttgccggatcaagagctaccaactctttttccgaaggtaactggcttcagcagagcgcagataccaaatactgtccttctagtgtagccgtagttaggccaccacttcaagaactctgtagcaccgcctacatacctcgctctgctaatcctgttaccagtggctgctgccagtggcgataagtcgtgtcttaccgggttggactcaagacgatagttaccggataaggcgcagcggtcgggctgaacggggggttcgtgcacacagcccagcttggagcgaacgacctacaccgaactgagatacctacagcgtgagctatgagaaagcgccacgcttcccgaagggagaaaggcggacaggtatccggtaagcggcagggtcggaacaggagagcgcacgagggagcttccagggggaaacgcctggtatctttatagtcctgtcgggtttcgccacctctgacttgagcgtcgatttttgtgatgctcgtcaggggggcggagcctatggaaa

SEQ ID NO: 1519 - DNA, 185 bp, synthetic construct
  source 1..185: mol_type = other DNA
aacgccagcaacgcggcctttttacggttcctggccttttgctggccttttgctcacatgttctttcctgcgttatcccctgattctgtggataaccgtattaccgcctttgagtgagctgataccgctcgccgcagccgaacgaccgagcgcagcgagtcagtgagcgaggaagcggaagagcg

SEQ ID NO: 1520 - DNA, 141 bp, synthetic construct
  source 1..141: mol_type = other DNA
cctgatgcggtattttctccttacgcatctgtgcggtatttcacaccgcatatggtgcactctcagtacaatctgctctgatgccgcatagttaagccagtatacactccgctatcgctacgtgactgggtcatggctgcg

SEQ ID NO: 1521 - DNA, 343 bp, synthetic construct
  source 1..343: mol_type = other DNA
ccccgacacccgccaacacccgctgacgcgccctgacgggcttgtctgctcccggcatccgcttacagacaagctgtgaccgtctccgggagctgcatgtgtcagaggttttcaccgtcatcaccgaaacgcgcgaggcagggtgccttgatgtgggcgccggcggtcgagtggcgacggcgcggcttgtccgcgccctggtagattgcctggccgtaggccagccatttttgagcggccagcggccgcgataggccgacgcgaagcggcggggcgtagggagcgcagcgaccgaagggtaggcgctttttgcagctcttcggctgtgcgctggccagacagt

SEQ ID NO: 1522 - DNA, 195 bp, synthetic construct
  source 1..195: mol_type = other DNA
tatgcacaggccaggcgggttttaagagttttaataagttttaaagagttttaggcggaaaaatcgccttttttctcttttatatcagtcacttacatgtgtgaccggttcccaatgtacggctttgggttcccaatgtacgggttccggttcccaatgtacggctttgggttcccaatgtacgtgctatccaca

SEQ ID NO: 1523 - DNA, 65 bp, synthetic construct
  source 1..65: mol_type = other DNA
ggaaacagaccttttcgacctttttcccctgctagggcaatttgccctagcatctgctccgtaca

SEQ ID NO: 1524 - DNA, 1074 bp, synthetic construct
  source 1..1074: mol_type = other DNA
ttaggaaccggcggatgcttcgccctcgatcaggttgcggtagcgcatgactaggatcgggccagcctgccccgcctcctccttcaaatcgtactccggcaggtcatttgacccgatcagcttgcgcacggtgaaacagaacttcttgaactctccggcgctgccactgcgttcgtagatcgtcttgaacaaccatctggcttctgccttgcctgcggcgcggcgtgccaggcggtagagaaaacggccgatgccgggatcgatcaaaaagtaatcggggtgaaccgtcagcacgtccgggttcttgccttctgtgatctcgcggtacatccaatcagctagctcgatctcgatgtactccggccgcccggtttcgctctttacgatcttgtagcggctaatcaaggcttcaccctcggataccgtcaccaggcggccgttcttggccttcttcgtacgctgcatggcaacgtgcgtggtgtttaaccgaatgcaggtttctaccaggtcgtctttctgctttccgccatcggctcgccggcagaacttgagtacgtccgcaacgtgtggacggaacacgcggccgggcttgtctcccttcccttcccggtatcggttcatggattcggttagatgggaaaccgccatcagtaccaggtcgtaatcccacacactggccatgccggccggccctgcggaaacctctacgtgcccgtctggaagctcgtagcggatcacctcgccagctcgtcggtcacgcttcgacagacggaaaacggccacgtccatgatgctgcgactatcgcgggtgcccacgtcatagagcatcggaacgaaaaaatctggttgctcgtcgcccttgggcggcttcctaatcgacggcgcaccggctgccggcggttgccgggattctttgcggattcgatcagcggccgcttgccacgattcaccggggcgtgcttctgcctcgatgcgttgccgctgggcggcctgcgcggccttcaacttctccaccaggtcatcacccagcgccgcgccgatttgtaccgggccggatggtttgcgaccgctcac

SEQ ID NO: 1525 - DNA, 428 bp, synthetic construct
  source 1..428: mol_type = other DNA
gccgattcctcgggcttgggggttccagtgccattgcagggccggcagacaacccagccgcttacgcctggccaaccgcccgttcctccacacatggggcattccacggcgtcggtgcctggttgttcttgattttccatgccgcctcctttagccgctaaaattcatctactcatttattcatttgctcatttactctggtagctgcgcgatgtattcagatagcagctcggtaatggtcttgccttggcgtaccgcgtacatcttcagcttggtgtgatcctccgccggcaactgaaagttgacccgcttcatggctggcgtgtctgccaggctggccaacgttgcagccttgctgctgcgtgcgctcggacggccggcacttagcgtgtttgtgcttttgctcattttctctttacctcattaac

SEQ ID NO: 1526 - DNA, 630 bp, synthetic construct
  source 1..630: mol_type = other DNA
tcaaatgagttttgatttaatttcagcggccagcgcctggacctcgcgggcagcgtcgccctcgggttctgattcaagaacggttgtgccggcggcggcagtgcctgggtagctcacgcgctgcgtgatacgggactcaagaatgggcagctcgtacccggccagcgcctcggcaacctcaccgccgatgcgcgtgcctttgatcgcccgcgacacgacaaaggccgcttgtagccttccatccgtgacctcaatgcgctgcttaaccagctccaccaggtcggcggtggcccatatgtcgtaagggcttggctgcaccggaatcagcacgaagtcggctgccttgatcgcggacacagccaagtccgccgcctggggcgctccgtcgatcactacgaagtcgcgccggccgatggccttcacgtcgcggtcaatcgtcgggcggtcgatgccgacaacggttagcggttgatcttcccgcacggccgcccaatcgcgggcactgccctggggatcggaatcgactaacagaacatcggccccggcgagttgcagggcgcgggctagatgggttgcgatggtcgtcttgcctgacccgcctttctggttaagtacagcgataaccttcat

SEQ ID NO: 1527 - DNA, 1279 bp, synthetic construct
  source 1..1279: mol_type = other DNA
gcgttccccttgcgtatttgtttatttactcatcgcatcatatacgcagcgaccgcatgacgcaagctgttttactcaaatacacatcacctttttagacggcggcgctcggtttcttcagcggccaagctggccggccaggccgccagcttggcatcagacaaaccggccaggatttcatgcagccgcacggttgagacgtgcgcgggcggctcgaacacgtacccggccgcgatcatctccgcctcgatctcttcggtaatgaaaaacggttcgtcctggccgtcctggtgcggtttcatgcttgttcctcttggcgttcattctcggcggccgccagggcgtcggcctcggtcaatgcgtcctcacggaaggcaccgcgccgcctggcctcggtgggcgtcacttcctcgctgcgctcaagtgcgcggtacagggtcgagcgatgcacgccaagcagtgcagccgcctctttcacggtgcggccttcctggtcgatcagctcgcgggcgtgcgcgatctgtgccggggtgagggtagggcgggggccaaacttcacgcctcgggccttggcggcctcgcgcccgctccgggtgcggtcgatgattagggaacgctcgaactcggcaatgccggcgaacacggtcaacaccatgcggccggccggcgtggtggtgtcggcccacggctctgccaggctacgcaggcccgcgccggcctcctggatgcgctcggcaatgtccagtaggtcgcgggtgctgcgggccaggcggtctagcctggtcactgtcacaacgtcgccagggcgtaggtggtcaagcatcctggccagctccgggcggtcgcgcctggtgccggtgatcttctcggaaaacagcttggtgcagccggccgcgtgcagttcggcccgttggttggtcaagtcctggtcgtcggtgctgacgcgggcatagcccagcaggccagcggcggcgctcttgttcatggcgtaatgtctccggttctagtcgcaagtattctactttatgcgactaaaacacgcgacaagaaaacgccaggaaaagggcagggcggcagcctgtcgcgtaacttaggacttgtgcgacatgtcgttttcagaagacggctgcactgaacgtcagaagccgactgcactatagcagcggaggggttggatcaaagtactttgatcccgaggggaaccctgtggttggcatgcacatacaaatggacgaacggataaaccttttcacgcccttttaaatatccgttattctaa

SEQ ID NO: 1528 - DNA, 22 bp, synthetic construct
  source 1..22: mol_type = other DNA
gaattccggctctctaccgtct

SEQ ID NO: 1529 - DNA, 22 bp, synthetic construct
  source 1..22: mol_type = other DNA
agacggtagagagccggaattc

SEQ ID NO: 1530 - DNA, 26 bp, synthetic construct
  source 1..26: mol_type = other DNA
  modified_base 1..3: mod_base = OTHER; note = Phosphorothioate linkage
  modified_base 24..26: mod_base = OTHER; note = Phosphorothioate linkage
gtgaattccggctctctaccgtctat

SEQ ID NO: 1531 - DNA, 26 bp, synthetic construct
  source 1..26: mol_type = other DNA
  modified_base 1..3: mod_base = OTHER; note = Phosphorothioate linkage
  modified_base 24..26: mod_base = OTHER; note = Phosphorothioate linkage
atagacggtagagagccggaattcac
